(19) United States
(12) Patent Application Publication
(10) Pub. No.: US 2023/0302134 A1
(43) Pub. Date: Sep. 28, 2023

(54) COMPOSITIONS AND METHODS FOR ENGINEERING AND SELECTION OF CAR T CELLS WITH DESIRED PHENOTYPES

(71) Applicant: Yale University, New Haven, CT (US)

(72) Inventors: Sidi Chen, Milford, CT (US); Xiaoyun Dai, West Haven, CT (US); Yaying Du, New Haven, CT (US); Jonathan Park, Scott AFB, IL (US)

(21) Appl. No.: 18/041,504

(22) PCT Filed: Aug. 13, 2021
(86) PCT No.: PCT/US2021/045882

§ 371 Date: Feb. 13, 2023

Related U.S. Application Data
(60) Provisional application No. 63/065,194, filed on Aug. 13, 2020.

(51) Int. Cl. A61K 39/00; C07K 14/725; C07K 16/28; A61P 35/00; C12N 15/10; C12N 15/86; C12N 15/11; C12N 9/22; C12N 15/90

(52) U.S. Cl. CPC A61K 39/4631; C07K 14/7051; A61K 39/4611; A61K 39/4643; C07K 16/2803; A61P 35/00; C12N 15/1082; C12N 15/1079; C12N 15/86; C12N 15/11; C12N 9/22; C12N 15/907; A61K 2039/505; C12N 2750/14143; C12N 2310/20; C12N 2800/80

(57) ABSTRACT

Compositions and methods for cellular genome engineering that permit simple and efficient targeted knock-in of a CAR and simultaneous knockout of individual genes are described. The compositions and methods are especially applicable to massively parallel engineering, selection, and identification of CAR T cell variants exhibiting a desired phenotype. AAV vectors containing crRNA and CAR expression cassettes and homology arms for targeted genomic integration thereof are provided. Also provided are libraries containing a plurality of AAV vectors and methods of use thereof in screens for identifying desirable CAR T cell variants. Methods of treatment using CAR T cell variants exhibiting improvements in one or more phenotypes are also provided.

### CROSS-REFERENCE TO RELATED APPLICATIONS

[0001] This application claims the benefit of and priority to U.S. Provisional Application No. 63/065,194 filed Aug. 13, 2020, which is hereby incorporated by reference in its entirety.

### STATEMENT REGARDING FEDERALLY SPONSORED RESEARCH

[0002] This invention was made with government support under CA238295, CA231112, and CA225498 awarded by National Institutes of Health. The government has certain rights in the invention.

### REFERENCE TO THE SEQUENCE LISTING

[0003] The Sequence Listing submitted as a text file named “YU_7927_PCT_ST25” created on Aug. 12, 2021, and having a size of 2,557,417 bytes is hereby incorporated by reference pursuant to 37 C.F.R. § 1.52(e)(5).

### FIELD OF THE INVENTION

[0004] The invention is generally related to the fields of gene editing technology and immunotherapy, and more particularly to methods of engineering improved chimeric antigen receptor T cells.

### BACKGROUND OF THE INVENTION

[0005] Cell therapies such as chimeric antigen receptor T cells (CAR-Ts) have proven to be powerful cancer therapeutics. CAR-T cell adoptive transfer therapy has demonstrated remarkable efficacy in the treatment of hematological cancers, particularly in B cell leukemia and lymphoma (Neelapu S S., et al., N Engl J Med., 377(26):2531-2544 (2017); Porter D L., et al., N Engl J Med., 365:725-733 (2011)), and has been approved by the Food and Drug Administration (FDA). An explosion of CAR-T and other forms of adoptive T cell therapies are underway. There are over 1,000 active clinical trials and numerous studies in pre-clinical stages (Tang J., et al., Nat Rev Drug Discov., 17(11):783-784 (2018)). These include CAR-Ts targeting a number of different cancer antigens; for example, CD19 and CD22-targeting CARs for B cell malignancies (Fry T J., et al., Nat Med., 24(1):20-28 (2018); Porter et al., 2011), B cell maturation antigen (BCMA)-targeting CAR for multiple myeloma, and other CARs for a number of solid tumor targets such as Mesothelin, HER2 and EGFRvIII (Ahmed N., et al., JAMA Oncology 3:1094-1101 (2017); Raje N., et al., N Engl J Med., 380:1726-1737 (2019). New CAR-T forms have recently emerged on a variety of targets such as NKG2D, MUC1, CD20, CD30, CD33, CD133, Claudins and others, although these CAR-Ts are at earlier stages of development (Brudno, J N. and Kochenderfer J N., Nature reviews Clinical oncology 15, 31 (2018); Reinhard K., et al, Science 367, 446-453 (2020)). These studies unveiled a broad landscape of CAR-T based immunotherapies across a wide range of oncology indications (June C H., et al., Science 359, 1361-1365 (2018)).

[0006] Despite the current success, there remains major challenges for CAR-T therapy. No CAR-T therapy has been approved by the FDA for solid tumors so far. Even in liquid cancers, despite high response rates, a large fraction of patients relapse owing to poor CAR-T cell expansion, persistence or loss of specific antigens (Porter D L., et al., Sci Transl Med. 7(303):303ra139 (2015); Gardner R., et al., Blood, 27(20):2406-10 (2016)). Multiple hurdles exist for CAR-T therapy, including antigen loss, metabolic suppression in the tumor microenvironment, insufficient T cell trafficking to the cancer site, lack of effective cancer cell killing, severe toxicity such as cytokine release syndrome (CRS), sub-optimal levels of T cell proliferation, and, as often observed in the clinic, failure of CAR-T persistence (June et al., 2018).

[0007] Many efforts have been invested to improve these features and to enhance CAR-T function. Examples include re-structuring of signaling domains (Sadelain M., et al., Nature 545, 423-431 (2017)), engineering of various CAR-T components such as single chain variable fragment (scFv) or transmembrane regions (Sadelain et al., 2017), overexpression of boosting factors (Lynn R C., et al., Nature 576, 293-300 (2019)), and co-administration of immunomodulating factors or viral vectors (Ma L., et al., Science 365, 162-168 (2019)), among others. Several studies have tested improvement in CAR-T cell function and persistence by changing costimulatory domains or lowering CAR binding affinity (Ghorashian S., et al., Nature Medicine 25, 1408-1414 (2019); Savoldo B., et al., The Journal of Clinical Investigation 121, 1822-1826 (2011)). Nevertheless, persistence remains a major challenge for CAR-T cells.

[0008] Thus, there is an urgent need for approaches to engineer improved CAR-Ts, allowing for CAR T therapy that shows reduced risk of immune rejection, reduced exhaustion, and enhanced persistence and effector function.

[0009] Therefore, it is an object of the invention to provide compositions and methods for engineering improved CAR T cells.

[0010] It is another object of the invention to provide CAR T cells that exhibit more stable CAR expression.

[0011] It is another object of the invention to provide CAR T cells that are more persistent in culture and in vivo.

[0012] It is yet another object of the invention to provide CAR T cells that exhibit increased cytotoxic activity and reduced exhaustion.

[0013] It is a further object of the invention to provide methods for efficient, high-throughput CAR-T engineering for the generation and selection of CAR T variants with a desired phenotype.

### SUMMARY OF THE INVENTION

[0014] Compositions and methods for cellular genomic engineering (e.g., T cell engineering) that permit simple and efficient targeted knock-in of a CAR and simultaneous knockout of individual genes are provided. The compositions and methods are especially applicable to massively parallel engineering, selection, and identification of CAR T cell variants exhibiting a desired phenotype (e.g., improved persistence) and their subsequent use in CAR-T therapy.

[0015] Provided is an AAV vector including one or more inverted terminal repeat (ITR) sequences, a 5′ homology arm, a crRNA expression cassette, a chimeric antigen receptor (CAR) expression cassette, and a 3′ homology arm. Typically, the crRNA expression cassette includes a promoter (e.g., U6) operationally linked to a sequence encoding one or more guide RNAs. The CAR expression cassette can include a promoter (e.g., an EFS promoter) and/or a polyadenylation signal sequence operationally linked to the sequence encoding the CAR. Preferably, the crRNA and CAR expression cassettes are positioned between the 5′ and 3′ homology arms. In some embodiments, the homology arms are homologous to a site in the TRAC locus.

[0016] In some embodiments, the crRNA expression cassette encodes two guide RNAs, a first guide RNA and a second guide RNA. In some embodiments, the first guide RNA targets a site in the TRAC locus while the second guide RNA targets any site in the genome. For example, the second guide RNA can target a gene involved in T cell exhaustion, T cell proliferation, T cell co-stimulation, memory T cell differentiation, T cell receptor signaling, epigenetic regulation, adaptive immune response, immune response to tumor cells, other immune functions, or combinations thereof.

[0017] The CAR can be designed to target (e.g., recognize or bind to) any desired antigen or ligand. Preferably, the CAR targets one or more cancer specific or cancer associated antigens. In some embodiments, the CAR is an anti-CD19 CAR or anti-CD22 CAR.

[0018] In some embodiments, the AAV vector includes the nucleotide sequence of SEQ ID NO:1 or SEQ ID NO:2. In some embodiments, the AAV vector includes a sequence having 75% or more sequence identity to SEQ ID NO:1 or SEQ ID NO:2. The AAV vector used in the compositions and methods can be a naturally occurring serotype of AAV or an artificial variant. In preferred embodiments, the serotype of the AAV vector is AAV6 or AAV9.

[0019] Libraries of AAV vectors are also described. The library can contain a plurality of the AAV vectors. In some embodiments, each vector in the library independently contains a crRNA expression cassette encoding a first guide RNA and a second guide RNA. In preferred embodiments, all the vectors in the library have the identical first guide RNA (e.g., a guide RNA targeting the TRAC locus). In some embodiments, each vector in the library contains a second guide RNA that is unique across the plurality of AAV vectors. The library can collectively contain from about 100 to about 300,000, from about 1,000 to about 5,000 or from about 5000, to about 10,000 distinct guide RNAs.

[0020] Cells containing the vectors and libraries thereof are also provided. For example, a population of cells can contain any of the aforementioned vectors. Populations of cells collectively containing the library are also provided. In some embodiments, each cell in the population contains at most one or two AAV vectors included in the library.

[0021] Methods of using the vectors and libraries thereof are also described. For examples, the vectors and libraries can be used to perform high-throughput screening. An exemplary method includes identifying one or more genes that enhance a desired phenotype of a cell containing a CAR. Typically, the method involves (a) contacting a population of cells collectively containing a library of vectors with an RNA-guided endonuclease under conditions suitable for genomic integration of the crRNA and CAR expression cassette and expression of the guide RNAs and CAR encoded therein; and (b) selecting for cells exhibiting the desired phenotype. In preferred embodiments the crRNA and CAR expression cassettes are integrated into the TRAC locus.

[0022] The RNA-guided endonuclease can be introduced to the cells via a viral vector that encodes the RNA-guided endonuclease, or direct electroporation of the endonuclease protein or endonuclease protein-RNA complex. The RNA-guided endonuclease can also be provided as an mRNA that encodes the RNA-guided endonuclease. The mRNA can contain modifications such as N6-methyladenosine (m6A), 5-methylcytosine (m5C), pseudouridine (ψ), N1-methylpseudouridine (me1ψ), and 5-methoxyuridine (5moU); a 5′ cap; a poly(A) tail; one or more nuclear localization signals; or combinations thereof. The mRNA can be codon optimized for expression in a eukaryotic cell and can for example, be introduced to the cells via electroporation, transfection, and/or nanoparticle mediated delivery. A preferred RNA-guided endonuclease is Cpf1, or a variant, derivative, or fragment thereof, such as, for example, Cpf1 derived from Francisella novicida U112 (FnCpf1), Acidaminococcus sp. BV3L6 (AsCpf1, including improved variants such as enAsCpf1), Lachnospiraceae bacterium ND2006 (LbCpf1), Lachnospiraceae bacterium MA2020 (Lb2Cpf1), Lachnospiraceae bacterium MC2017 (Lb3Cpf1), Moraxella bovoculi 237 (MbCpf1), or Prevotella disiens (PdCpf1).

[0023] The methods are suitable for identification of cells that exhibit any desirable features or phenotypes. Exemplary phenotypes that can be screened or selected for include increased tumor/tumor microenvironment infiltration, increased or optimized target cell affinity, increased target cell cytotoxicity, increased persistence, increased expansion/proliferation, reduced exhaustion, increased anti-cancer metabolic function, increased ability to prevent immune escape, reduced unspecific cytokine production, reduced off-target toxicity, reduced cytokine release syndrome (CRS) (e.g., when introduced in vivo), and combinations thereof. In some embodiments, cells having the desired phenotype are selected for by co-culturing the population of cells with target cells for any time period suitable for adequate selection. This can be a defined time period, such as from about 1 to about 60 days. The cells can be repeatedly co-cultured during this time period (e.g., new batches of target cells can be periodically added to the co-culture). Typically, the target cells express one or more antigens recognized by the CAR. In some embodiments, the target cells are cancer cells. In some embodiments, cells having the desired phenotype are selected for by flow cytometry-based or affinity-based sorting, immune marker-based selection, in vivo tumor infiltration (e.g., exposing the population of cells to target cells, such as tumor cells, within a subject for a time period permitting adequate selection), CAR-antigen interaction, directed evolution, or combinations thereof.

[0024] The method can additionally include identifying the crRNA expression cassette present in the cells that have been selected. Such identification can be achieved by sequencing the genomic DNA of the selected cells (e.g., at or near the region of genomic integration). Once the crRNA expression cassette present in the selected cells is known, the genes that enhance the desired phenotype can be identified as genes targeted by the guide RNAs encoded by the crRNA expression cassette.

[0025] The cells used in the compositions and methods can be T cells (e.g., CD8+ T cells such as effector T cells, memory T cells, central memory T cells, and effector memory T cells; CD4+ T cells such as Th1 cells, Th2 cells, Th3 cells, Th9 cells, Th17 cells, Tfh cells, and Treg cells; or gamma-delta T cells/gdT cells), hematopoietic stem cell (HSC), macrophages, natural killer cells (NK), B cells, dendritic cells (DC), or other immune cells.

[0026] Isolated cells that, for example, can be modified according to the foregoing methods are described. For example, an isolated CAR T cell expressing a CAR and also having one or more mutations in one or more genes identified by the screening method above is provided. In some embodiments, the cell can be selected for and isolated by the screening method or the cell can be independently generated by modifying a cell to express a CAR of interest and to contain one or more mutations in one or more genes identified by the screen. The mutation(s) can cause partial or complete loss of function of the genes or gene products thereof. In some embodiments, the CAR T cell contains one or more mutations in one or more genes selected from Table 2 or Table 3. In preferred embodiments, the CAR T cell contains one or more mutations in genes selected from PRDM1, DPF3, SLAMF1, TET2, HFE, PELI1, PDCD1, HAVCR2/TIM3, TET2, NR4A2, LAIR1, USB1 and combinations thereof. In some embodiments, the isolated CAR T cell exhibits one or more desirable phenotypes (e.g., a phenotype selected or screened for with the provided methods). For example, the cell can exhibit increased memory, increased cell proliferation, increased persistence, increased cytotoxicity towards a target cell (e.g., cancer cell), decreased T cell terminal differentiation, and/or reduced T cell exhaustion compared to a CAR T cell not including the mutations in the one or more genes. A population of cells can be derived by expanding the isolated cells. Pharmaceutical compositions containing the population of cells with a pharmaceutically acceptable buffer, carrier, diluent or excipient are also provided.

[0027] Methods of treatment are also provided. An exemplary method involves treating a subject having a disease, disorder, or condition by administering to the subject an effective amount of the aforementioned pharmaceutical composition. In some embodiments, the disease, disorder, or condition is associated with an elevated expression or specific expression of an antigen. Typically, the cells in the composition (e.g., CAR T cells) express a CAR that specifically targets the antigen. The cells for use in accordance with the compositions and methods can be derived from any appropriate source. For example, in some embodiments, the cells can be obtained from a healthy donor. In some embodiments, the cells can be obtained from the subject having the disease, disorder, or condition. Preferably the cells are obtained from the donor or subject prior to undergoing genetic modification to express the CAR and to contain the desired mutation(s) in the one or more genes.

[0028] In some embodiments, the disease, disorder, or condition is a cancer, an inflammatory disease, a neuronal disorder, HIV/AIDS, diabetes, a cardiovascular disease, an infectious disease, or an autoimmune disease. Exemplary cancers include, but are not limited to, a leukemia or lymphoma such as chronic lymphocytic leukemia (CLL), acute lymphocytic leukemia (ALL), acute myeloid leukemia (AML), chronic myelogenous leukemia (CML), mantle cell lymphoma, non-Hodgkin's lymphoma, and Hodgkin's lymphoma.

[0029] Preferably, the subject to be treated in accordance with any of the foregoing methods of treatment can be a human.

### BRIEF DESCRIPTION OF THE DRAWINGS

[0030] FIG. 1 shows establishment and characterization of the CLASH system for mass chimeric antigen receptor (CAR) engineering in human primary T cells. FIG. 1 is a schematic representation of the AAV construct design for CLASH. The crRNA expression cassette and CAR-expression cassette were inserted between the left and right TRAC homology arms in the AAV backbone. FIG. 1 also shows a schematic representation of CLASH mediated simultaneous CAR-T and Descartes library knock-in into the TRAC locus in human primary CD8 T cells. The human primary CD8 T cells were transduced with AAV-CLASH Descartes-Lib AAV6 after electroporation with Cas12a mRNA for 4 hours. The crRNAs and CAR transgenes show parallel integration into the TRAC locus by AAV-mediated HDR.

[0031] FIG. 2A is a schematic showing the Rene and Descartes library design. Diagrams of immune gene category circles are not drawn to scale. The Descartes library contains the entire Rene library as well as additional immune gene sets and additional non-targeting control (NTC) crRNAs. FIG. 2B is a schematic representation of the CAR-T cell persistence screen by continuous co-culture with NALM6 cells. CAR-T cells were co-cultured with NALM6 at E:T ratio=0.2:1 for 8 rounds after electroporation. The stimulation timepoints are indicated by the time line. FIGS. 2C-2H are bar graphs showing quantification of memory, cytotoxic and exhaustion marker expression on vector and Descartes-Lib CAR-T cells after repeated co-culture with NALM6. Quantification of the percentage of CD45RO⁺CCR7⁺ (FIG. 2C), IFNγ⁺ (FIG. 2D), TNFα⁺ (FIG. 2E), PD-1⁺ (FIG. 2F), LAG3⁺ (FIG. 2G), and TIGIT (FIG. 2H) cells are shown in each group (infection replicates, n=3). Unpaired two-sided t tests were used to assess significance. * p<0.05, *** p<0.001. Data are shown as mean±s.e.m.

[0032] FIGS. 3A-3B are graphs showing screen analysis from day 32 (FIG. 3A) or day 54 (FIG. 3B) samples vs day 0 samples using difference in log normalized crRNA abundance. FIGS. 3C-3K are graphs showing quantification of CD45RO⁺CCR7⁺ (FIG. 3C, FIG. 3D, FIG. 3E), IFNγ⁺ (FIG. 3F, FIG. 3G, FIG. 3H) and TNFα⁺ (FIG. 3I, FIG. 3J, FIG. 3K) CAR-T cell percentages compared to the vector control for each candidate gene. The marker expression levels were measured after electroporation for 5 days. One-way ANOVA with Dunnett's multiple comparisons test was used to assess statistical significance. FIG. 3L is a graph showing quantification of the CAR-T cells to cancer cell ratio at day 14 (pooled spleen and bone marrow samples; n=6 mice, 12 samples). Mann Whitney test was used to assess significance. FIG. 3M is a Venn diagram of overlapping top crRNAs between in vitro (day 32 and day 54) and in vivo (day 7, day 11 and day 14) CLASH-Descartes experiments. FDR=5% * p<0.05, ** p<0.01, *** p<0.001 and n.s P>0.05. Data are shown as mean±s.e.m.

[0033] FIGS. 4A-4T shows the characterization of PRDM1 mutant CAR T cells. FIG. 4A is a schematic representation of PRDM1 protein primary structure, with two different PRDM1 crRNAs' cutting sites indicated on PR domain and Zinc Finger domain, respectively. Predicted PRDM1-cr1 and PRDM1-cr2 cutting site are indicated by red arrows. The 3 qPCR probe target sites are indicated by blue arrows. FIG. 4B is a graph showing quantification of total indel percentage at the genomic locus targeted by PRDM1-cr1/cr2 in different healthy donors and CAR-T forms. Genomic DNA was isolated from CAR-T cells which were treated by vector or PRDM1-cr1/cr2 AAV6 for 5 days (technical replicates, n=3). Data are shown as mean±s.e.m. FIGS. 4C-4D show the Nextera-NGS sequencing results from showing unique variants observed at the genomic region targeted by the PRDM1-cr1 (FIG. 4C) and PRDM1-cr2 (FIG. 4D) in CAR-T cells. The percentage of total reads that correspond to each genotype is indicated on the right blue boxes. Red arrowheads indicate predicted cleavage sites. One representative sample's data was shown from 3 infection replicates. FIGS. 4E-4M are graphs showing quantification of the percentage of CD62L⁺ (FIG. 4E), CCR7⁺ (FIG. 4F), CD28⁺ (FIG. 4G), IL7RA⁺ (FIG. 4H), TNFα⁺ (FIG. 4I), IFNγ⁺ (FIG. 4J), Granzyme B⁺ (FIG. 4K), LAG3⁺ (FIG. 4L) and TIM3⁺ (FIG. 4M) cells in vector or PRDM1-cr1/cr2 mutant CAR-T cells (infection replicates, n=3). All experiments were analyzed by Two-way ANOVA with Tukey's multiple comparisons test to assess significance. * P<0.05, ** p<0.01 *** P<0.001 and n.s p>0.05, Data are shown as mean±s.e.m. FIGS. 4N-4O are graphs showing quantification of the frequency of CCR7⁺ (FIG. 4N) and CD62L⁺ (FIG. 4O) in different healthy donors (n=5) after transduction with vector or PRDM1-cr1 AAV6 for 5 days. Paired T-test was used to assess significance. ** P<0.01. FIGS. 4P-4Q are graphs showing proliferation of CLASH-generated PRDM1 and control CD22 CAR-T cells in response to stimulation with mitomycin-C pre-treated NALM6 cells after electroporation for 5 days in donor 2 (FIG. 4P) and donor 0286 (FIG. 4Q). CAR-T cells were transduced with vector or PRDM1-cr1 AAV6 separately (cell culture replicates, n=3). Two-way ANOVA was used to assess significance, *** p<0.001. Data are shown as mean±s.e.m. FIG. 4R is a graph showing time-course analysis of IFNγ protein expression in vector and PRDM1 mutant CAR-T cells in response to NALM6 cells stimulation in each round. Two-way ANOVA with Tukey's multiple-comparisons test was used to assess significance. Comparisons were also made between vector and PRDM1 groups at each time point. * P<0.05, ** P<0.01 and *** P<0.001, Data are shown as mean±s.e.m. FIGS. 4S-4T are graphs showing the cytotoxicity of vector and PRDM1 mutant CAR-T cells by kill assay after 7 rounds of co-culture with NALM6 with donor 2 (FIG. 4S) and donor 0286 (FIG. 4T). In vitro cytotoxic activity of CAR-T cells was measured by bioluminescence assay at different E/T ratios, using NALM6-GL cells stably transduced with GFP and luciferase genes as target cells. Two-way ANOVA was used to assess significance. *** P<0.001, Data are shown as mean±s.e.m.

[0034] FIGS. 5A-5L shows that PRDM1 mutant CAR-Ts have enhanced therapeutic efficacy in vivo. FIG. 5A is a schematic representation of the experimental design. To assess the anti-tumor ability of PRDM1 mutant CAR-T cells in vivo, mice were injected with 5×10⁵ NALM6-GL cells at day 0. Vector or PRDM1 mutant CAR-T cells, or non-transduced CD8 T cells were infused at day 3. Mice were imaged every 3-4 days. After termination, the spleen, blood and bone marrow were analyzed by flow cytometry. FIG. 5B is a graph showing quantification of whole-body bioluminescence signal over time, comparing normal CD8 T cells, vector and PRDM1 CAR22 cells. FIG. 5C is a graph showing quantification of whole-body bioluminescence signal over time, comparing normal T cells, vector and PRDM1-CAR19 cells. In FIGS. 5A and 5B, two-way ANOVA was used to assess significance. *** P<0.001, Data are shown as mean±s.e.m. FIGS. 5D-5F are graphs showing quantification of CAR-T cells to cancer cell ratio in blood (FIG. 5D), bone marrow (FIG. 5E), and spleen (FIG. 5F). Mann Whitney test was used to assess significance. FIGS. 5G-5I are graphs showing quantification of memory-like CAR-T (CD45RO⁺CD62L⁺) percentage in blood (FIG. 5G), bone marrow (FIG. 5H), and spleen (FIG. 5I). In FIGS. 5D-5I: vector CAR19 (n=8) and PRDM1 CAR19 (n=8). Mann Whitney test was used to assess significance. ** P<0.01, *** P<0.001 and n.s P>0.05, Data are shown as mean±s.e.m. FIGS. 5J-5L are survival curves showing the survival of leukemia-bearing animals treated either with vector or PDRM1 mutant CD22 CAR T cells on day 3 after tumor induction (FIG. 5J), vector or PDRM1 mutant CD22 CAR T cells on day 8 after tumor induction (FIG. 5K), and vector or PDRM1 mutant CD19 CAR T cells on day 3 after tumor induction (FIG. 5L). pXD60=Vector control anti-CD22 TRAC knockin CAR-T; pXD60-PRDM1=cr-PRDM1 CLASH anti-CD22 TRAC knockin CAR-T; pXD71=Vector control anti-CD19 TRAC knockin CAR-T; pXD71-PRDM1=cr-PRDM1 CLASH anti-CD19 TRAC knockin CAR-T. In FIGS. 5J-5L, a log-rank test was used to assess significance, p<0.0001.

[0035] FIG. 6A is a volcano plot of differentially expressed genes for PRDM1 mutant vs control CD22 CAR-T cells on day 33. FIGS. 6B-6C are enrichment plots showing enriched gene ontology pathways found by DAVID analysis on differentially upregulated genes (FIG. 6B) and differentially downregulated genes (FIG. 6C) for PRDM1 deficient vs control CAR-Ts at q-value threshold <1e-3 on day 33.

[0036] FIGS. 7A-7B are graphs showing quantification of the percentage of CD28 (FIG. 7A) and IL7RA (FIG. 7B) positive cells in CLASH-generated vector and PRDM1 mutant CD22 CAR-T cells at 1^{st}, 3^{rd} and 5^{th} rounds of co-culture with NALM6 cells (infection replicates, n=3). FIGS. 7C-7J are graphs showing quantification of mRNA expression by RT-PCR analysis for KLF2 (FIG. 7C), S1PR1 (FIG. 7D), TBX21 (FIG. 7E), FOXO1 (FIG. 7F), NFKB1 (FIG. 7G), STAT1 (FIG. 7H), STAT6 (FIG. 7I), CDCA7 (FIG. 7J), and BATF (FIG. 7K) in vector and PRDM1 mutant CAR-T cells at 1^{st}, 3^{nd} and 5^{th} rounds of co-culture with NALM6 cells (infection replicates, n=3). FIGS. 7L-7O are graphs showing quantification of the percentage of TIM3/HAVCR2 (FIG. 7L), LAG3 (FIG. 7M), 2B4/CD244 (FIG. 7N), and CD39/ENTPD1 (FIG. 7O) positive cells in vector and PRDM1 mutant CAR-T cells at 1^{st}, 3^{nd} and 5^{th} round co-culture with NALM6 cells (infection replicates, n=3). Expression of surface markers was evaluated by flow cytometry. All experimental data were analyzed by Two-way ANOVA with Sidak's multiple comparisons test to assess significance. * P<0.05, ** P<0.01, *** P<0.001 and n.s P>0.05, Data are shown as mean±s.e.m. FIG. 7P is a schematic showing the immunological phenotypes and associated genes in PRDM1 mutant CAR-T cells.

### DETAILED DESCRIPTION OF THE INVENTION

[0037] As a “living drug,” genetically engineered CAR-T cells show promise for potent and specific anti-tumor activity in the clinic (Porter, D L., et al., N. Engl. J. Med., 365(8): 725-733 (2011)). Transduction efficiency, transgene expression levels, and CAR stability or retention, are important aspects of CAR T cell therapy. However, in traditional lentiviral transduction, CAR-T cells tend to lose their transgenes and, therefore, the ability to recognize and destroy cancer cells (Ellis, J., Human Gene Therapy., 16:1241-1246 (2005)). Thus, engineering CAR-T persistence has become one of the most important tasks to allow CAR-Ts to take on their full power and thereby efficacy in vivo.

[0038] As shown in the Examples, a high-throughput approach has been developed to test for factors, which when engineered in CAR-T cells, can enhance their persistence and/or other desirable features. This approach addresses several technical barriers in CAR T engineering, including: (1) how to build CAR-T knock-ins in a massively parallel manner; (2) how to fairly compare between the different variants of CAR-T with a stable and standardized core CAR component across all the variants; (3) how to ensure quantitative assessment between different CAR variants at the same setting at high resolution; (4) how to target the high-probability set of CAR-T candidates to maximize the chance of evolving or selecting the most promising candidates for validation and downstream research and development.

[0039] These challenges are overcome by development of a platform for highly efficient massively parallel CAR-T engineering. This platform, Cas12a/Cpf1-based Large-scale AAV-perturbation with Simultaneous HDR-knockin (CLASH), permits rapid generation of custom-desired scales of CAR-T variants in a simple step, by Cpf1 mRNA electroporation with multi-functional pooled AAV transduction. The Examples demonstrate that the CLASH method generated a library scale of CAR-Ts each knocked into a desired locus in the genome, with one additional candidate immune regulator perturbed by the Cas12a/Cpf1 system. The library of CAR-T variants was assayed in a systematic way by using a long-term CAR-T cell and antigen specific cancer cell co-culture system, thereby identifying candidate CAR-T variants that have long-term persistence. Re-engineering and validation of these top variants individually showed that they enhanced CAR-T cell persistence by increasing memory-like surface markers and/or cytotoxic cytokine release. Among these, a PRDM1-mutant CAR-T increased the memory cell potential, longevity, proliferation and persistence in vivo, translating into therapeutic efficacy in a mouse model of leukemia. CLASH thus demonstrates rapid, efficient and highly scalable engineering of CAR-Ts for streamlined optimization of persistence, while maintaining versatility for application to other desired features.

### I. Definitions

[0040] “Introduce” in the context of genome modification refers to bringing into contact. For example, to introduce a gene editing composition (e.g., containing an RNA-guided endonuclease or AAV vector) to a cell is to provide contact between the cell and the composition. The term encompasses penetration of the contacted composition to the interior of the cell by any suitable means, e.g., via transfection, electroporation, transduction, gene gun, nanoparticle delivery, etc.

[0041] “Homologous” refers to the sequence similarity or sequence identity between two polypeptides or between two nucleic acid molecules. When a position in both of the two compared sequences is occupied by the same base or amino acid monomer subunit, e.g., if a position in each of two DNA molecules is occupied by adenine, then the molecules are homologous at that position. The percent of homology between two sequences is a function of the number of matching or homologous positions shared by the two sequences divided by the number of positions compared X 100. For example, if 6 of 10 of the positions in two sequences are matched or are homologous, then the two sequences are 60% homologous. By way of example, the DNA sequences ATTGCC and TATGGC share 50% homology. Generally, a comparison is made when two sequences are aligned to give maximum homology.

[0042] The term “operably linked” or “operationally linked” refers to functional linkage between a regulatory sequence and a heterologous nucleic acid sequence permitting them to function in their intended manner (e.g., resulting in expression of the latter). The term encompasses positioning of a regulatory region and a sequence to be transcribed in a nucleic acid so as to influence transcription or translation of such a sequence. For example, to bring a coding sequence under the control of a promoter, the translation initiation site of the translational reading frame of the polypeptide is typically positioned between one and about fifty nucleotides downstream of the promoter. A promoter can, however, be positioned as much as about 5,000 nucleotides upstream of the translation initiation site or about 2,000 nucleotides upstream of the transcription start site. A promoter typically comprises at least a core (basal) promoter.

[0043] “Endogenous” refers to any material from or produced inside an organism, cell, tissue or system. “Exogenous” refers to any material introduced from or produced outside an organism, cell, tissue or system.

[0044] The term “expression” encompasses the transcription and/or translation of a particular nucleotide sequence driven by a promoter. “Expression vector” or “expression cassette” refers to a vector containing a recombinant polynucleotide having expression control sequences operatively linked to a nucleotide sequence to be expressed. An expression vector contains sufficient cis-acting elements for expression; other elements for expression can be supplied by the host cell or in an in vitro expression system. Expression vectors include all those known in the art, such as cosmids, plasmids (e.g., naked or contained in liposomes), phagemids, BACs, YACs, and viral vectors (e.g., vectors derived from lentiviruses, retroviruses, adenoviruses, and adeno-associated viruses) that incorporate the recombinant polynucleotide.

[0045] The term “homology directed repair” or HDR refers to a cellular process in which cut or nicked ends of a DNA strand are repaired by polymerization from a homologous template nucleic acid. Thus, the original sequence is replaced with the sequence of the template. The homologous template nucleic acid can be provided by homologous sequences elsewhere in the genome (sister chromatids, homologous chromosomes, or repeated regions on the same or different chromosomes). Alternatively, an exogenous template nucleic acid can be introduced to obtain a specific HDR-induced change of the sequence at the target site. In this way, specific mutations can be introduced at the cut site.

[0046] A “mutation” refers to a change in a nucleotide (e.g., DNA) sequence resulting in an alteration from a given reference sequence. The mutation can be a deletion, insertion, duplication, and/or substitution of at least one deoxyribonucleic acid base such as a purine (adenine and/or guanine) and/or a pyrimidine (thymine, uracil and/or cytosine). Mutations may or may not produce discernible changes in the observable characteristics (phenotype) of an subject.

[0047] The term “antigen” refers to a molecule capable of being bound by an antibody or T-cell receptor (e.g., a CAR). In some embodiments, an antigen is capable of provoking an immune response. This immune response can involve either antibody production, or the activation of specific immunologically-competent cells, or both. The skilled artisan will understand that any macromolecule, including proteins or peptides, can serve as an antigen. Furthermore, antigens can be derived from recombinant or genomic DNA. A skilled artisan will understand that any DNA, which comprises a nucleotide sequences or a partial nucleotide sequence encoding a protein that elicits an immune response therefore encodes an “antigen”. Furthermore, one skilled in the art will understand that an antigen need not be encoded solely by a full length nucleotide sequence of a gene. Moreover, a skilled artisan will understand that an antigen need not be encoded by a “gene” at all. An antigen can be synthesized or can be derived from a biological sample. Such a biological sample can include, but is not limited to a tissue sample, a tumor sample, a cell or a biological fluid. In the context of cancer “antigen” refers to an antigenic substance that is produced in a tumor cell, which can therefore trigger an immune response in the host. These cancer antigens can be useful as markers for identifying a tumor cell, which could be a potential candidate/target during treatment or therapy. There are several types of cancer or tumor antigens. There are cancer/tumor specific antigens (TSA) which are present only on tumor cells and not on healthy cells, as well as cancer/tumor associated antigens (TAA) which are present in tumor cells and also on some normal cells. In some embodiments, the TAA is expressed more abundantly in cancer cells than in in non-cancerous cells. In some embodiments, the chimeric antigen receptors are specific for tumor specific antigens. In some embodiments, the chimeric antigen receptors are specific for tumor associated antigens.

[0048] “Bi-specific chimeric antigen receptor” refers to a CAR that comprises two antigen binding domains, wherein the first domain is specific for a first ligand/antigen/target, and wherein the second domain is specific for a second ligand/antigen/target. In some embodiments, the ligand/antigen/target is a B-cell specific protein, a tumor-specific ligand, a tumor associated ligand, or combinations thereof. A bispecific CAR is specific to two different antigens. A multi-specific or multivalent CAR is specific to more than one different antigen, e.g., 2, 3, 4, 5, or more. In some embodiments, a multi-specific or multivalent CAR targets and/or binds three or more different antigens.

[0049] “Encoding” or “encode” refers to the inherent property of specific sequences of nucleotides in a polynucleotide, such as a gene, a cDNA, or an mRNA, to serve as templates for synthesis of other polymers and macromolecules in biological processes having either a defined sequence of nucleotides (e.g., rRNA, tRNA and mRNA) or a defined sequence of amino acids and the biological properties resulting therefrom. Thus, a gene encodes a protein if transcription and translation of mRNA corresponding to that gene produces the protein in a cell or other biological system. Both the coding strand, the nucleotide sequence of which is identical to the mRNA sequence, and the non-coding strand, used as the template for transcription of a gene or cDNA, can be referred to as encoding the protein or other product of that gene or cDNA.

[0050] The terms “target nucleic acid,” “target sequence,” and “target site” refer to a nucleic acid sequence to which an oligonucleotide such as a gRNA is designed to specifically hybridize. The target nucleic acid has a sequence that is complementary to the nucleic acid sequence of the corresponding oligonucleotide directed to the target. The target nucleic acid or target site can refer to the specific subsequence of a larger nucleic acid to which the oligonucleotide is directed or to the overall sequence (e.g., a gene or mRNA). The difference in usage will be apparent from context.

[0051] The term “locus” is the specific physical location of a DNA sequence (e.g. of a gene) on a chromosome. The term “locus” can refer to the specific physical location of an RNA guided endonuclease target sequence on a chromosome. Such a locus can comprise a target sequence that is recognized and/or cleaved by an RNA guided endonuclease. It is understood that a locus of interest can include a nucleic acid sequence that exists in the main body of genetic material (e.g., in a chromosome) of a cell and also a portion of genetic material that can exist independently to said main body of genetic material such as plasmids, episomes, virus, transposons or in organelles such as mitochondria as non-limiting examples.

[0052] “Isolated” means altered or removed from the natural state. For example, a nucleic acid or a peptide naturally present in a living animal is not “isolated,” but the same nucleic acid or peptide partially or completely separated from the coexisting materials of its natural state is “isolated.” An isolated nucleic acid or protein can exist in substantially purified form, or can exist in a non-native environment such as, for example, a host cell. An “isolated nucleic acid” refers to a nucleic acid segment or fragment which has been separated from sequences which flank it in a naturally occurring state, e.g., a DNA fragment which has been removed from the sequences which are normally adjacent to the fragment in a genome in which it naturally occurs. The term also applies to nucleic acids which have been substantially purified from other components which naturally accompany the nucleic acid (e.g., RNA or DNA or proteins, which naturally accompany it in the cell). The term therefore includes, for example, a recombinant DNA which is incorporated into a vector, into an autonomously replicating plasmid or virus, or into the genomic DNA of a prokaryote or eukaryote, or which exists as a separate molecule (e.g., as a cDNA or a genomic or cDNA fragment produced by PCR or restriction enzyme digestion) independent of other sequences.

[0053] In the context of cells, the term “isolated” refers to a cell altered or removed from its natural state. An isolated cell is thus in an environment different from that in which the cell naturally occurs, e.g., separated from its natural milieu such as by concentrating to a concentration at which it is not found in nature. “Isolated cell” is meant to include cells that are within samples that are substantially enriched for the cell of interest and/or in which the cell of interest is partially or substantially purified.

[0054] The terms “transformed,” “transduced,” and “transfected” encompass the introduction of a nucleic acid or other material into a cell by one of a number of techniques known in the art.

[0055] A “vector” is a composition of matter which comprises an isolated nucleic acid and which can be used to deliver the isolated nucleic acid to the interior of a cell. Examples of vectors include but are not limited to, linear polynucleotides, polynucleotides associated with ionic or amphiphilic compounds, plasmids, and viruses. Thus, the term “vector” includes an autonomously replicating plasmid or a virus. The term is also construed to include non-plasmid and non-viral compounds which facilitate transfer of nucleic acid into cells, such as, for example, polylysine compounds, liposomes, and the like. Examples of viral vectors include, but are not limited to, adenoviral vectors, adeno-associated virus vectors, retroviral vectors, and the like.

[0056] The term “percent (%) sequence identity” describes the percentage of nucleotides or amino acids in a candidate sequence that are identical with the nucleotides or amino acids in a reference nucleic acid sequence, after aligning the sequences and introducing gaps, if necessary, to achieve the maximum percent sequence identity. Alignment for purposes of determining percent sequence identity can be achieved in various ways that are within the skill in the art, for instance, using publicly available computer software such as BLAST, BLAST-2, ALIGN, ALIGN-2 or Megalign (DNASTAR) software. Appropriate parameters for measuring alignment, including any algorithms needed to achieve maximal alignment over the full-length of the sequences being compared can be determined by known methods.

[0057] The % sequence identity of a given nucleic acid or amino acid sequence C to, with, or against a given nucleic acid or amino acid sequence D (which can alternatively be phrased as a given sequence C that has or includes a certain % sequence identity to, with, or against a given sequence D) is calculated as follows:

100 times the fraction W/Z,

where W is the number of nucleotides or amino acids scored as identical matches by the sequence alignment program in that program's alignment of C and D, and where Z is the total number of nucleotides or amino acids in D. It will be appreciated that where the length of sequence C is not equal to the length of sequence D, the % sequence identity of C to D will not equal the % sequence identity of D to C.

[0058] The term “subject” includes, but is not limited to, animals, plants, bacteria, viruses, parasites and any other organism or entity. The subject can be a vertebrate, more specifically a mammal (e.g., a human, horse, pig, rabbit, dog, sheep, goat, non-human primate, cow, cat, guinea pig or rodent), a fish, a bird, a reptile, or an amphibian. The term does not denote a particular age or sex. Thus, adult and newborn subjects, as well as fetuses, whether male or female, are intended to be covered. A patient refers to a subject afflicted with a disease or disorder. The term “patient” includes human and veterinary subjects.

[0059] The term “inhibit” or “reduce” and other forms of the words such as “inhibiting” or “reducing” means to decrease, hinder or restrain a particular characteristic such as an activity, response, condition, disease, or other biological parameter. It is understood that this is typically in relation to some standard or expected value, but that it is not always necessary for the standard or relative value to be referred to. “Inhibits” or “reduce” can also mean to hinder or restrain the synthesis, expression or function of a protein relative to a standard or control. Inhibition/reduction can include, but is not limited to, the complete ablation of the activity, response, condition, or disease. For example, the term encompasses a 10% reduction in the activity, response, condition, disease, or other biological parameter as compared to the native or control level. In some embodiments, the reduction can be about 1 to 100%, or an integer therein, or any amount of reduction in between as compared to native or control levels.

[0060] “Treatment” or “treating” means to administer a composition to a subject or a system with an undesired condition (e.g., cancer). The condition can include one or more symptoms of a disease, pathological state, or disorder. Treatment includes medical management of a subject with the intent to cure, ameliorate, stabilize, or prevent a disease, pathological condition, or disorder. This includes active treatment, that is, treatment directed specifically toward the improvement of a disease, pathological state, or disorder, and also includes causal treatment, that is, treatment directed toward removal of the cause of the associated disease, pathological state, or disorder. In addition, this term includes palliative treatment, that is, treatment designed for the relief of symptoms rather than the curing of the disease, pathological state, or disorder; preventative treatment, that is, treatment directed to minimizing or partially or completely inhibiting the development of the associated disease, pathological state, or disorder; and supportive treatment, that is, treatment employed to supplement another specific therapy directed toward the improvement of the associated disease, pathological state, or disorder. It is understood that treatment, while intended to cure, ameliorate, stabilize, or prevent a disease, pathological condition, or disorder, need not actually result in the cure, amelioration, stabilization or prevention. The effects of treatment can be measured or assessed as described and as known in the art as is suitable for the disease, pathological condition, or disorder involved. Such measurements and assessments can be made in qualitative and/or quantitative terms. Thus, for example, characteristics or features of a disease, pathological condition, or disorder and/or symptoms of a disease, pathological condition, or disorder can be reduced to any effect or to any amount.

[0061] “Prevention” or “preventing” means to administer a composition to a subject or a system at risk for an undesired condition (e.g., cancer). The condition can include one or more symptoms of a disease, pathological state, or disorder. The condition can also be a predisposition to the disease, pathological state, or disorder. The effect of the administration of the composition to the subject can be the cessation of a particular symptom of a condition, a reduction or prevention of the symptoms of a condition, a reduction in the severity of the condition, the complete ablation of the condition, a stabilization or delay of the development or progression of a particular event or characteristic, or reduction of the chances that a particular event or characteristic will occur.

[0062] The terms “effective amount” or “therapeutically effective amount” mean a quantity sufficient to alleviate or ameliorate one or more symptoms of a disorder, disease, or condition being treated, or to otherwise provide a desired pharmacologic and/or physiologic effect. Such amelioration only requires a reduction or alteration, not necessarily elimination. The precise quantity will vary according to a variety of factors such as subject-dependent variables (e.g., age, immune system health, weight, etc.), the disease or disorder being treated, as well as the route of administration, and the pharmacokinetics and pharmacodynamics of the agent being administered.

[0063] By “pharmaceutically acceptable” is meant a material that is not biologically or otherwise undesirable. For example, the material can be administered to a subject along with the selected compound without causing any undesirable biological effects or interacting in a deleterious manner with any of the other components of the pharmaceutical composition in which it is contained.

[0064] Recitation of ranges of values are merely intended to serve as a shorthand method of referring individually to each separate value falling within the range, unless otherwise indicated herein, and each separate value is incorporated into the specification as if it were individually recited herein.

[0065] Use of the term “about” is intended to describe values either above or below the stated value in a range of approximately +/−10%; in other embodiments the values can range in value either above or below the stated value in a range of approx. +/−5%.

### II. Compositions

[0066] Compositions for use in the methods are provided. For example, gene editing compositions for use in methods of modifying the genome of a cell are provided. Exemplary compositions include nucleic acid vectors, libraries thereof, and cells containing the vectors and libraries thereof. Pharmaceutical compositions containing modified cells are also provided.

[0067] A. Gene Editing Compositions

[0068] Exemplary gene editing compositions for modifying the genome of a cell include an RNA-guided endonuclease and a vector (e.g., AAV vector). The vector can contain a sequence (e.g., a crRNA expression cassette) that encodes one or more crRNAs that direct the endonuclease to one or more target genes, a sequence that encodes one or more chimeric antigen receptors (e.g., a CAR expression cassette), and/or one or more sequences homologous to one or more target sites (e.g., TRAC).

[0069] The RNA-guided endonuclease and vector can be in the same or different compositions and can be introduced to the cell together or separately. For example, an RNA-guided endonuclease and vector can be provided in different compositions that are introduced to the cell together or separately. In some embodiments, when the gene editing compositions are administered as an isolated nucleic acid or are contained within an expression vector, the RNA-guided endonuclease (e.g., Cpf1) can be encoded by the same nucleic acid or vector as the crRNA and CAR expression cassettes. Alternatively, or in addition, the RNA-guided endonuclease can be encoded in a physically separate nucleic acid or vector from the vector encoding the crRNA and CAR expression cassette.

[0070] In some embodiments, after introduction of the RNA-guided endonuclease, AAV vector can be introduced into the cells either immediately, or after a certain period of time such as, about 1 h, about 2 h, about 3 h, about 4 h, about 5 h, about 6 h, about 7 h, about 8 h, about 9 h, about 10 h, about 12 h, about 24 h, about 48 h, about 72 h, or about 96 h.

[0071] The RNA-guided endonuclease can alter (e.g., increase or reduce expression and/or activity of) one or more target genes or gene products thereof. For example, the RNA-guided endonuclease can cause disruption of one or more target genes. This disruption includes but is not limited to alterations in the genome (such as, but not limited to, insertions, deletions, duplications, translocations, DNA or histone methylation, acetylation, and combinations thereof) that can result in reduced or abolished expression and/or activity of the target gene or gene product. Methods of determining the expression and/or activity of a gene product are known in the art. These include, but are not limited to, PCR, northern blot, southern blot, western blot, nuclease surveyor assays, sequencing, ELISA, FACS, mRNA-sequencing, single-cell RNA-sequencing, and other molecular biology, chemical, biochemical, cell biology, and immunology assays. A skilled person, based on methods known in the art, and the described teachings would understand how to determine and/or confirm alteration of a target gene.

[0072] The RNA-guided endonuclease can be introduced to the cell through a variety of techniques, including viral and non-viral approaches. For example, the RNA-guided endonuclease can be introduced via a viral vector (e.g., a retrovirus such as a lentivirus, adenovirus, poxvirus, Epstein-Barr virus, or adeno-associate virus (AAV)) that encodes the RNA-guided endonuclease. Non-viral approaches such as physical and/or chemical methods can also be used, including, but not limited to cationic liposomes and polymers, DNA nanoclew, gene gun, microinjection, transfection, electroporation, nucleofection, particle bombardment, ultrasound utilization, magnetofection, conjugation to cell penetrating peptides, and/or nanoparticle mediated delivery. Such methods are described for example, in Nayerossadat N., et al., Adv. Biomed. Res., 1:27 (2012) and Lino C A, et al., Drug Deliv., 25(1):1234-1257 (2018). In view of the respective advantages and disadvantages of each method, a skilled artisan would be able to determine an optimal method for introduction of the RNA-guided endonuclease.

[0073] In preferred embodiments, the mRNA is introduced to the cell via electroporation. Electroporation is temporary destabilization of the cell membrane by insertion of a pair of electrodes into it so that nucleic acid molecules (e.g., DNA, RNA) in the surrounding media of the destabilized membrane would be able to penetrate into cytoplasm and nucleoplasm of the cell. The RNA-guided endonuclease can also be introduced via direct electroporation of the endonuclease protein or endonuclease protein-RNA complex (e.g., endonuclease protein complexed with a crRNA).

[0074] In preferred embodiments, the RNA-guided endonuclease can be provided to the cell in the form of an mRNA that encodes the RNA-guided endonuclease. The mRNA can be modified or unmodified. The mRNA can be modified for example, to reduce immunogenicity, to optimize translation, and/or to confer increased stability and/or expression of the RNA-guided endonuclease. The modified mRNA can incorporate a number of chemical changes to the nucleotides, including changes to the nucleobase, the ribose sugar, and/or the phosphodiester linkage. These modified mRNA can improve efficiency of the RNA-guided endonuclease, reduce off-target effects, reduce toxicity, increase endonuclease protein levels, increase endonuclease activity, and/or increase mRNA stability relative to the unmodified mRNA. Li, B., et al., Nat. Biomed. Eng., 1(5): pii: 0066 (2017) and WO 2017/181107 disclose compositions and methods of modifying mRNAs that can be used in accordance with the compositions and methods.

[0075] Exemplary mRNA modifications include, without limitation, N6-methyladenosine (m6A), 5-methylcytosine (m5C), pseudouridine (ψ), N1-methylpseudouridine (me1ψ), and 5-methoxyuridine (5moU), a 5′ cap, a poly(A) tail, one or more nuclear localization signals, or combinations thereof.

[0076] The mRNA can be codon optimized for expression in a eukaryotic cell (e.g., a cell derived from a plant, human, mouse, rat, rabbit, dog, or non-human mammal or primate). Codon-optimization describes gene engineering approaches that use changes of rare codons to synonymous codons that are more frequently used in the cell type of interest with the aim of increasing protein production. In general, codon optimization involves modifying a nucleic acid sequence for enhanced expression in the host cells of interest by replacing at least one codon (e.g., about or more than about 1, 2, 3, 4, 5, 10, 15, 20, 25, 50, or more codons) of the native sequence with codons that are more frequently or most frequently used in the genes of that host cell while maintaining the native amino acid sequence. Various species exhibit particular bias for certain codons of a particular amino acid. Codon bias (differences in codon usage between organisms) often correlates with the efficiency of translation of messenger RNA (mRNA), which is in turn believed to be dependent on, among other things, the properties of the codons being translated and the availability of particular transfer RNA (tRNA) molecules. The predominance of selected tRNAs in a cell is generally a reflection of the codons used most frequently in peptide synthesis. Thus, genes can be tailored for optimal gene expression in a given organism based on codon optimization. Codon usage tables are readily available, for example, at the “Codon Usage Database” available at www.kazusa.orjp/codon/ and these tables can be adapted in a number of ways. See Nakamura, Y., et al., Nucl. Acids Res., 28:292 (2000). Computer algorithms for codon optimizing a particular sequence for expression in a particular host cell are also available, such as Gene Forge (Aptagen; Jacobus, PA), are also available. In some embodiments, one or more codons in a sequence encoding an RNA-guided endonuclease corresponds to the most frequently used codon for a particular amino acid.

[0077] The gene editing compositions also include libraries, e.g., libraries of the AAV vectors. The library can be a collection of multiple vectors, which may be the same or different. In preferred embodiments, the library contains a plurality of different AAV vectors. For example, in some embodiments, all the vectors in the library have the identical first guide RNA (e.g., a guide RNA targeting the TRAC locus) while each vector in the library also contains a second guide RNA that is unique across the plurality of AAV vectors. A unique guide RNA is the only RNA of its kind in the vector or library of vectors (e.g., the guide RNA can be the only one having a particular nucleotide sequence). Collectively, the library can contain any number of guide RNAs. For example, the library can contain guide RNAs that collectively target the entire set of protein coding genes in the genome (e.g., a human genome-wide library). Alternatively, the library can contain guide RNAs that target a selected subset of genes or sites. In some embodiments, the library collectively contains a plurality of guide RNAs encoded by nucleic acid sequences selected from SEQ ID NOs:3-12,134. In preferred embodiments, the library collectively contains guide RNAs encoded by the nucleic acid sequences of SEQ ID NOs:3-4,087 (Rene library) or SEQ ID NOs:4,088-12,134 (Descartes library).

[0078] The library can contain multiple (e.g., 2, 3, 4, 5, 6, 7, 8, 9, 10, or more) unique guide RNAs targeting the same gene. In preferred embodiments, the library also contains a representative number (e.g., 1000) of non-targeting control guide RNAs. Preferably, the library contains a total number of guide RNAs that is representative of all the genes or sites of interest to be targeted. For example, the upper limit on the number of guide RNAs can be reflective of current pooled oligonucleotide synthesis and/or cloning limits (e.g., about 300,000 distinct guide RNA sequences). In some embodiments, the library contains about 100 or more distinct guide RNA sequences. In some embodiments, the library contains about 1000, 5000, 8000, 10,000, 15,000, 20,000, 30,000, 40,000, 50000, 100000, 150000, 200000, 250000, 3000000, or more distinct guide RNA sequences. In some embodiments, the library contains from about 100 to about 300000 distinct guide RNA sequences. In some embodiments, the library can be in the form of a collection of plasmids or a collection of viruses collectively containing the vectors of the library.

[0079] 1. RNA-Guided Endonuclease

[0080] An “RNA-guided endonuclease” is a polypeptide whose endonuclease activity and specificity depend on its association with an RNA molecule. The full sequence of this RNA molecule or more generally a fragment of this RNA molecule has the ability to specify a target sequence in the genome. In general, this RNA molecule has the ability to hybridize a target sequence and to mediate the endonuclease activity of the RNA-guided endonuclease. Non-limiting examples of RNA-guided endonucleases include Cas1, Cas1B, Cas2, Cas3, Cas4, Cas5, Cas6, Cas7, Cas8, Cas9 (also known as Csn1 and Csx12), Cpf1, homologues thereof, or modified versions thereof. A preferred RNA-guided endonuclease is Cas12a (Cpf1), a component of the CRISPR/Cas system.

[0081] CRISPR (Clustered Regularly Interspaced Short Palindromic Repeats) is an acronym for DNA loci that contain multiple, short, direct repetitions of base sequences. The prokaryotic CRISPR/Cas system has been adapted for use as gene editing (silencing, enhancing or changing specific genes) for use in eukaryotes (see, for example, Cong, Science, 15:339(6121):819-823 (2013) and Jinek, et al., Science, 337(6096):816-21 (2012)). By providing a cell with the required elements including a cas gene and specifically designed CRISPRs, the genome can be cut and modified at any desired location. Methods of preparing compositions for use in genome editing using CRISPR/Cas systems are described in detail in WO 2013/176772 and WO 2014/018423, which are specifically incorporated by reference herein in their entireties.

[0082] The term “Cas” (CRISPR-associated) generally refers to an effector protein of a CRISPR-Cas system or complex. The term “Cas” can be used interchangeably with the terms “CRISPR” protein, “CRISPR-Cas protein,” “CRISPR effector,” CRISPR-Cas effector,” “CRISPR enzyme,” “CRISPR-Cas enzyme” and the like, unless otherwise apparent. The RNA-guided endonuclease can be a Cas effector, Cas protein, or Cas enzyme. In general, a “CRISPR system,” refers collectively to transcripts and other elements involved in the expression of or directing the activity of CRISPR-associated (“Cas”) genes, including sequences encoding a Cas gene, and where applicable, a tracr (trans-activating CRISPR) sequence (e.g. tracrRNA or an active partial tracrRNA), a tracr-mate sequence (encompassing a “direct repeat” and a tracrRNA-processed partial direct repeat in the context of an endogenous CRISPR system), a guide sequence (also referred to as a “spacer” in the context of an endogenous CRISPR system), or “RNA(s)” as that term is used (e.g., RNA(s) to guide Cas, such as Cas9 or Cpf1, e.g. CRISPR RNA (crRNA) and/or transactivating (tracr) RNA or a single guide RNA (sgRNA) (chimeric RNA)) or other sequences and transcripts from a CRISPR locus. In general, a CRISPR system is characterized by elements that promote the formation of a CRISPR complex at the site of a target sequence. See, e.g., Shmakov et al. (2015) “Discovery and Functional Characterization of Diverse Class 2 CRISPR-Cas Systems,” Molecular Cell, DOI: dx.doi.org/10.1016/j.molcel.2015.10.008.

[0083] The RNA-guided endonuclease can be a Cas effector protein selected from, without limitation, a type II, type V, or type VI Cas effector protein.

[0084] In some embodiments, one or more elements of a CRISPR system are introduced into a target cell such that expression of the elements of the CRISPR system direct formation of a CRISPR complex at one or more target sites. While the specifics can be varied in different engineered CRISPR systems, the overall methodology is similar. A practitioner interested in using CRISPR technology to target a DNA sequence can insert a short DNA fragment containing the target sequence into a guide RNA expression plasmid. The sgRNA expression plasmid contains the target sequence (about 20 nucleotides), a form of the tracrRNA sequence (the scaffold) if needed, as well as a suitable promoter and necessary elements for proper processing in eukaryotic cells. Such vectors are commercially available (see, for example, Addgene). Many of the systems rely on custom, complementary oligomers that are annealed to form a double stranded DNA and then cloned into the sgRNA expression plasmid. Co-expression of the sgRNA and the appropriate Cas enzyme in the cell results in a single or double strand break (depending of the activity of the Cas enzyme) at the desired target site.

### Cas12a (Cpf1)

[0085] In preferred embodiments, the RNA-guided endonuclease is Cpf1. The RNA guided endonuclease can be a Cpf1 ortholog, variant, or engineered derivative, derived from any bacterial species known to contain Cpf1. For example, Cpf1 effector proteins can be derived from an organism from a genus including Streptococcus, Campylobacter, Nitratifractor, Staphylococcus, Parvibaculum, Roseburia, Neisseria, Gluconacetobacter, Azospirillum, Sphaerochaeta, Lactobacillus, Eubacterium, Corynebacter, Carnobacterium, Rhodobacter, Listeria, Paludibacter, Clostridium, Lachnospiraceae, Clostridiaridium, Leptotrichia, Francisella, Legionella, Alicyclobacillus, Methanomethyophilus, Porphyromonas, Prevotella, Bacteroidetes, Helcococcus, Letospira, Desulfovibrio, Desulfonatronum, Opitutaceae, Tuberibacillus, Bacillus, Brevibacilus, Methylobacterium or Acidaminococcus. More particularly, in some embodiments, the RNA-guided endonuclease is a Cpf1 from one of the following organisms: S. mutans, S. agalactiae, S. equisimilis, S. sanguinis, S. pneumonia; C. jejuni, C. coli; N. salsuginis, N. tergarcus; S. auricularis, S. carnosus; N. meningitides, N. gonorrhoeae; L monocytogenes, L ivanovii; C. botulinum, C. difficile, C. tetani, C. sordellii.

[0086] In some embodiments, the Cpf1 is derived or isolated from a bacterial species selected from Francisella tularensis 1 (e.g., Francisella tularensis subsp. Novicida), Prevotella albensis, Lachnospiraceae bacterium MC2017 1, Butyrivibrio proteoclasticus, Peregrinibacteria bacterium GW2011_GWA2_33_10, Parcubacteria bacterium GW2011_GWC2_44_17, Smithella sp. SCADC, Acidaminococcus sp. BV3L6, Lachnospiraceae bacterium MA2020, Candidatus Methanoplasma termitum, Eubacterium eligens, Moraxella bovoculi 237, Leptospira inadai, Lachnospiraceae bacterium ND2006, Porphyromonas crevioricanis 3, Prevotella disiens and Porphyromonas macacae. A preferred RNA-guided endonuclease is a Cpf1, or a variant, derivative, or fragment thereof derived from Francisella novicida U112 (FnCpf1), Acidaminococcus sp. BV3L6 (AsCpf1), Lachnospiraceae bacterium ND2006 (LbCpf1), Lachnospiraceae bacterium MA2020 (Lb2Cpf1), Lachnospiraceae bacterium MC2017 (Lb3Cpf1), Moraxella bovoculi 237 (MbCpf1), Butyrivibrio proteoclasticus (BpCpf1), Parcubacteria bacterium GWC2011_GWC2_44_17 (PbCpf1); Peregrinibacteria bacterium GW2011_GWA_33_10 (PeCpf1), Leptospira inadai (LiCpf1), Smithella sp. SC_K08D17 (SsCpf1), Porphyromonas crevioricanis (PcCpf1), Porphyromonas macacae (PmCpf1), Candidatus Methanoplasma termitum (CMtCpf1), Eubacterium eligens (EeCpf1), Moraxella bovoculi 237 (MbCpf1), or Prevotella disiens (PdCpf1). In preferred embodiments, the Cpf1 is LbCpf1, or a variant, derivative, or fragment thereof.

[0087] Cpf1 effector proteins can be modified, e.g., an engineered or non-naturally-occurring Cpf1. The modification can contain mutations of one or more amino acid residues of the effector protein. The mutations can be in one or more catalytically active domains of the effector protein (e.g., RuvC domain or a catalytically active domain which is homologous to a RuvC domain). The effector protein can have reduced or abolished nuclease activity compared with an effector protein lacking the one or more mutations. In some embodiments, the effector protein does not direct cleavage of a DNA or RNA strand at the target locus of interest.

[0088] In some embodiments, the one or more modified or mutated amino acid residues are D917A, E1006A or D1255A with reference to the amino acid position numbering of the FnCpf1 effector protein. In some embodiments, the one or more mutated amino acid residues are D908A, E993A, and D1263A with reference to the amino acid positions in AsCpf1 or LbD832A, E925A, D947A, and D1180A with reference to the amino acid positions in LbCpf1.

[0089] Mutations can also be made at neighboring residues, e.g., at amino acids near those indicated above that participate in the nuclease activity. In some embodiments, only the RuvC domain is inactivated, and in other embodiment, another putative nuclease domain is inactivated. In some embodiments, two FnCpf1, AsCpf1 or LbCpf1 variants (each a different nickase) are used to increase specificity. For example, two nickase variants can be used to cleave DNA at a target (where both nickases cleave a DNA strand, while minimizing or eliminating off-target modifications where only one DNA strand is cleaved and subsequently repaired). In some embodiments, the Cpf1 effector protein cleaves sequences associated with or at a target locus of interest as a homodimer comprising two Cpf1 RNA-guided endonucleases. In some embodiments, the homodimer can contain two Cpf1 effector proteins having different mutations in their respective RuvC domains.

[0090] In some embodiments, the Cpf1 is a wildtype protein, a humanized Cpf1, a variant, a derivative, a fragment, a shuffled domain version, or combinations thereof. In some embodiments, the RNA-guided endonuclease can be a chimeric Cpf1 effector protein having a first fragment from a first Cpf1 effector protein ortholog and a second fragment from a second Cpf1 effector protein ortholog, and wherein the first and second effector protein orthologs are different (e.g., derived from different organisms).

[0091] The Cpf1 effector protein can have one or more heterologous functional domains such as a nuclear localization signal (NLS) domain. The NLS domain(s) can be positioned at or near or in proximity to a terminus of the Cpf1 effector protein. Heterologous functional domains also include transcriptional activation domains (e.g., VP64, VPR, p65, HSF1, Activ), transcriptional repression domains (e.g., KRAB; methyl transferase domains of DNMT family members including DNMT1, DNMT3A, DNMT3B, and DNMT3L; or a SID domain (e.g. SID4X)), and nuclease domains (e.g., Fok1). The heterologous functional domains can have one or more of the following activities: methylase activity, demethylase activity, transcription activation activity, transcription repression activity, transcription release factor activity, histone modification activity, nuclease activity, single-strand RNA cleavage activity, double-strand RNA cleavage activity, single-strand DNA cleavage activity, double-strand DNA cleavage activity and nucleic acid binding activity. The heterologous functional domains can be fused, linked, tethered, or otherwise associated with the RNA-guided endonuclease.

[0092] A protospacer adjacent motif (PAM) or PAM-like motif directs binding of the RNA-guided endonuclease complex to the target locus of interest. In some embodiments, the PAM is 5′ TTN, where N is A/C/G or T and the effector protein is FnCpf1p; the PAM is 5′ TTTV, where V is A/C or G and the effector protein is AsCpf1, LbCpf1 or PaCpf1p. In some embodiments, the PAM is located upstream of the 5′ end of the protospacer. The T-rich PAMs of the Cpf1 family allow for targeting and editing of AT-rich genomes.

[0093] The Cas12a effector protein can further include dCpf1 fused to an adenosine or cytidine deaminase such as those described in U.S. Provisional Application Nos. 62/508,293, 62/561,663, and 62/568,133, 62/609,949, and 62/610,065. Additional Cas12a effector proteins that can be used are discussed in International Patent Application Nos. WO 2016/205711, WO 2017/106657, and WO 2017/172682.

[0094] Given the potential toxicity of the RNA-guided endonuclease within the cells, due to possible non-specific interactions with various RNAs in the cell or off-site targeting, some approaches can be taken to induce the nuclease activity of the RNA-guided endonuclease, such as Cpf1, transiently (e.g., mRNA electroporation), ideally during the life-span of the guide RNA into the cells. In some embodiments, the RNA-guided endonuclease (such as Cpf1) can be expressed under a stabilized or inactive form, which is made active upon activation by an enzyme produced by the cell or destabilization of its polypeptide structure inside the cell. Conditional protein stability can be obtained for instance by fusion of the endonuclease to a stabilizing/destabilizing protein based, as a non-limiting example, on the FKBP/rapamycin system, where protein conformational change is induced by a small molecule. Chemical or light induced dimerization of a protein partner fused to the endonuclease protein can also be used to lock or unlock the endonuclease.

[0095] 2. Vector

[0096] Suitable vectors for inclusion in the gene editing compositions or for providing elements of the gene editing compositions include, without limitation, plasmids and viral vectors derived from, for example, bacteriophages, baculoviruses, retroviruses (such as lentiviruses), adenoviruses, poxviruses, Epstein-Barr viruses, and adeno-associated viruses (AAV). The viral vector can be derived from a DNA virus (e.g., dsDNA or ssDNA virus) or an RNA virus (e.g., an ssRNA virus). Numerous vectors and expression systems are commercially available from commercial vendors including Addgene, Novagen (Madison, WI), Clontech (Palo Alto, CA), Stratagene (La Jolla, CA), and Invitrogen/Life Technologies (Carlsbad, CA).

[0097] In preferred embodiments, AAV vectors are provided as components of the gene editing compositions for modifying the genome of one or more cells. The AAV vector can provide one or more elements of the gene editing compositions (e.g., crRNA expression cassette, CAR expression cassette, homology arms).

[0098] AAV is a non-pathogenic, single-stranded DNA virus that has been actively employed over the years for delivering therapeutic genes in both in vitro and in vivo systems (Choi, et al., Curr. Gene Ther., 5:299-310, (2005)). AAV belongs to the parvovirus family and is dependent on co-infection with other viruses, mainly adenoviruses, in order to replicate. Initially distinguished serologically, molecular cloning of AAV genes has identified hundreds of unique AAV strains in numerous species. Each end of the single-stranded DNA genome contains an inverted terminal repeat (ITR), which is the only cis-acting element required for genome replication and packaging. The single-stranded AAV genome contains three genes, Rep (Replication), Cap (Capsid), and aap (Assembly). These three genes give rise to at least nine gene products through the use of three promoters, alternative translation start sites, and differential splicing. These coding sequences are flanked by the ITRs. The Rep gene encodes four proteins (Rep78, Rep68, Rep52, and Rep40), while Cap expression gives rise to the viral capsid proteins (VP; VP1/VP2/VP3), which form the outer capsid shell that protects the viral genome, as well as being actively involved in cell binding and internalization. It is estimated that the viral coat contains 60 proteins arranged into an icosahedral structure with the capsid proteins in a molar ratio of 1:1:10 (VP1:VP2:VP3).

[0099] Recombinant AAV (rAAV), which lacks viral DNA, is essentially a protein-based nanoparticle engineered to traverse the cell membrane, where it can ultimately traffic and deliver its DNA cargo into the nucleus of a cell. In the absence of Rep proteins, ITR-flanked transgenes encoded within rAAV can form circular concatemers that persist as episomes in the nucleus of transduced cells. Because recombinant episomal DNA does not integrate into host genomes, it will eventually be diluted over time as the cell undergoes repeated rounds of replication. This will eventually result in the loss of the transgene and transgene expression, with the rate of transgene loss dependent on the turnover rate of the transduced cell. These characteristics make rAAV ideal for certain gene therapy applications.

[0100] AAV can be advantageous over other viral vectors due to low toxicity (e.g., this can be due to the purification method not requiring ultra centrifugation of cell particles that can activate the immune response) and low probability of causing insertional mutagenesis because AAV does not integrate into the host genome (primarily remaining episomal).

[0101] The sequences placed between the ITRs will typically include a mammalian promoter, gene of interest, and a terminator. In many cases, strong, constitutively active promoters are desired for high-level expression of the gene of interest. Commonly used promoters of this type include the CMV (cytomegalovirus) promoter/enhancer, elongation factor 1α short (EFS), SV40 (simian virus 40), chicken β-actin and CAG (CMV, chicken β-actin, rabbit β-globin). All of these promoters provide constitutively active, high-level gene expression in most cell types. Some of these promoters are subject to silencing in certain cell types, therefore this consideration should be evaluated for each application.

[0102] In some cases it can be advantageous for a transgene (e.g., being targeted for integration) to be kept under the control of an endogenous promoter (e.g., a promoter at or near the site of integration). For example, the CAR expression cassette provided by the AAV vector can contain a splice acceptor/donor, 2A peptide, and/or internal ribosome entry site (IRES) operationally linked to a transgene (e.g., CAR) to allow expression of the transgene in frame with a gene at the site of integration and/or under the control of the promoter at the site of integration. In other cases, it can be advantageous for the transgene to be under the control of an exogenous promoter, such as a constitutive promoter or an inducible promoter. In such cases, the CAR expression cassette provided by the AAV vector can contain a promoter (e.g., EFS or tetracycline-inducible promoter) operationally linked to a transgene (e.g., reporter gene, CAR).

[0103] In some embodiments, the crRNA expression cassette and CAR expression cassette are present on one nucleic acid molecule, e.g., one AAV vector. In some embodiments, the crRNA expression cassette is present on a first nucleic acid molecule, e.g., a first AAV vector, and the CAR expression cassette is present on a second nucleic acid molecule, e.g., a second AAV vector. The first and second nucleic acid molecules can be AAV vectors, e.g., AAV6 or AAV9. In some embodiments, the RNA-guided endonuclease, crRNA expression cassette and CAR expression cassette are present on one nucleic acid molecule, e.g., an AAV vector such as AAV6 or AAV9.

[0104] The packaging limit of the vector to be used would determine the number and combinations of gene editing elements (e.g., RNA-guided endonuclease, crRNA expression cassette(s), CAR expression cassette(s), or combinations thereof) that can be provided by said vector. For example, AAV has a packaging limit of approximately 4.5 to 4.8 Kb. As such, attempts to package larger constructs can lead to significantly reduced virus production. In preferred embodiments, the RNA-guided endonuclease is introduced to the cell by a different means from the vector encoding the crRNA expression cassette(s) and/or CAR expression cassette(s). Introduction of gene editing compositions (e.g., RNA-guided endonuclease and the AAV vector(s) containing the crRNA expression cassette(s), CAR expression cassette(s)) to the cell can be performed ex vivo and at the same or different times.

[0105] In preferred embodiments, the vector is an AAV vector including (i) a crRNA expression cassette encoding one or more guide RNAs (e.g., selected from SEQ ID NOs:3-12,134); (ii) a chimeric antigen receptor (CAR) expression cassette; and (iii) 5′ and 3′ homology-directed repair (HDR) arms for targeted genomic integration. Preferably, the crRNA expression cassette encodes two guide RNAs. In some embodiments, a first guide RNA is constitutively present (e.g., a guide RNA targeting the TRAC locus). In some embodiments, the crRNA expression cassette contains one or more restriction sites (e.g., BbsI) downstream of the first guide RNA that permit insertion of any sequence of interest (e.g., a sequence encoding a second guide RNA). The sequence to be inserted can be variable, for example, the sequence can be varied depending on the gene or locus to be targeted. The presence of one or more restriction sites (e.g., BbsI) allows for the vector to be linearized, followed by ligation of a sequence encoding the guide RNA. In some embodiments, the crRNA expression cassette and CAR expression cassette are positioned between the 5′ and 3′ HDR arms, such that both cassettes undergo genomic integration at a specific target site.

[0106] An exemplary sequence of suitable AAV vector containing an anti-CD22 CAR is provided below:

cctgcaggca gctgcgcgct cgctcgctca ctgaggccgc
ccgggcaaag cccgggcgtc gggcgacctt tggtcgcccg
gcctcagtga gcgagcgagc gcgcagagag ggagtggcca
actccatcac taggggttcc tgcggccgca cgcgtgatgt
aaggagctgc tgtgacttgc tcaaggcctt atatcgagta
aacggtagtg ctggggctta gacgcaggtg ttctgattta
tagttcaaaa cctctatcaa tgagagagca atctcctggt
aatgtgatag atttcccaac ttaatgccaa cataccataa
acctcccatt ctgctaatgc ccagcctaag ttggggagac
cactccagat ttcaagatgt acagtttgct ttgctgggcc
tttttcccat gcctgccttt actctgccag agttatattg
ctggggtttt gaagaagatc ctattaaata aaagaataag
cagtattatt aagtagccct gcatttcagg tttccttgag
tggcaggcca ggcctggccg tgaacgttca ctgaaatcat
ggcctcttgg ccaagattga tagcttgtgc ctgtccctga
gtcccagtcc gtcacgagca gotggtttct aatatgctat
ttcccgtata aagcatgaga ccgtgacttg ccagccccac
agagccccgc ccttgtccat cactggcatc tggactccag
cctgggttgg ggcaaagagg gaaatgagat catgtcctaa
ccctgatcct cttgtcccac agatatccag aaccctgacc
cgcgttagcg ctagaagagg gcctatttcc catgattcct
tcatatttgc atatacgata caaggctgtt agagagataa
ttggaattaa tttgactgta aacacaaaga tattagtaca
aaatacgtga cgtagaaagt aataatttct tgggtagttt
gcagttttaa aattatgttt taaaatggac tatcatatgc
ttaccgtaac ttgaaagtat ttcgatttct tggctttata
tatcttgtgg aaaggacgaa acaccgtaat ttctactaag
tgtagatgag tctctcagct ggtacactaa tttctactaa
gtgtagatgg tcttcgagaa gacctttttt aagcttggcg
tggatccgat atcaactaga tottgagaca aggtacctag
gtcttgaaag gagtgggaat tggctccggt gcccgtcagt
gggcagagcg cacatcgccc acagtccccg agaagttggg
gggaggggtc ggcaattgat ccggtgccta gagaaggtgg
cgcggggtaa actgggaaag tgatgtcgtg tactggctcc
gcctttttcc cgagggtggg ggagaaccgt atataagtgc
agtagtcgcc gtgaacgttc tttttcgcaa cgggtttgcc
gccagaacac aggaccggtt ctagacgtac ggccaccatg
cttctgctcg tgacaagcct gctgctgtgc gagctgcccc
accctgcctt tctgctgatc cctcaggtgc agctgcagca
gtctggccct ggcctcgtga agcctagcca gaccctgagc
ctgacctgtg ccatcagcgg cgatagcgtg tccagcaata
gcgccgcctg gaactggatc agacagagcc ctagcagagg
cctggaatgg ctgggccgga cctactaccg gtccaagtgg
tacaacgact acgccgtgtc cgtgaagtcc cggatcacca
tcaaccccga caccagcaag aaccagttct ccctgcagct
gaacagcgtg acccccgagg ataccgccgt gtactactgc
gccagagaag tgaccggcga cctggaagat gccttcgaca
tctggggcca gggcacaatg gtcaccgtgt ctagcggagg
cggcggaagc gacatccaga tgacacagag ccccagctcc
ctgagcgcca gcgtgggaga cagagtgacc atcacctgtc
gggccagcca gaccatctgg tcctacctga actggtatca
gcagcggcct ggcaaggccc ccaacctgct gatctatgcc
gccagctcac tgcagagcgg cgtgcccagc agattttccg
gcagaggcag cggcaccgac ttcaccctga caatcagttc
cctgcaggcc gaggacttcg ccacctacta ctgccagcag
agctacagca tcccccagac cttcggccag gggaccaagc
tggaaatcaa agcggccgca ggtaccacca cgacgccagc
gccgcgacca ccaacaccgg cgcccaccat cgcgtcgcag
cccctgtccc tgcgcccaga ggcatgccgg ccagcagcag
ggggcgcagt gcacacgagg gggctggact tcgcctgtga
tatctacatc tgggcgccct tggccgggac ttgtggggtc
cttctcctgt cactggttat caccctttac tgcaaacggg
gcagaaagaa actcctgtat atattcaaac aaccatttat
gagaccagta caaactactc aagaggaaga tggctgtagc
tgccgatttc cagaagaaga agaaggagga tgtgaactga
gagtgaagtt cagcaggagc gcagacgccc ccgcgtacca
gcagggccag aaccagctct ataacgagct caatctagga
cgaagagagg agtacgatgt tttggacaag agacgtggcc
gggaccctga gatgggggga aagccgagaa ggaagaaccc
tcaggaaggc ctgtacaatg aactgcagaa agataagatg
gcggaggcct acagtgagat toggatgaaa ggcgagcgcc
ggaggggcaa ggggcacgat ggcctttacc agggtctcag
tacagccacc aaggacacct acgacgccct tcacatgcag
gccctgcccc ctcgctaagc tagcaataaa agatctttat
tttcattaga tctgtgtgtt ggttttttgt gtggtaccga
gagactctaa atccagtgac aagtctgtct gcctattcac
cgattttgat tctcaaacaa atgtgtcaca aagtaaggat
totgatgtgt atatcacaga caaaactgtg ctagacatga
ggtctatgga cttcaagagc aacagtgctg tggcctggag
caacaaatct gactttgcat gtgcaaacgc cttcaacaac
agcattattc cagaaaacac cttcttcccc agcccaggta
agggcagctt tggtgccttc gcaggctgtt tccttgcttc
aggaatggcc aggttctgcc cagagctctg gtcaatgatg
tctaaaactc ctctgattgg tggtctcggc cttatccatt
gccaccaaaa ccctcttttt actaagaaac agtgagcctt
gttctggcag tccagagaat gacacggaaa aaaagcagat
gaagagaagg tggcaggaga gggcacgtgg cccagcctca
gtctctccaa ctgagttcct gcctgcctgc ctttgctcag
actgtttgcc ccttactgct cttctaggcc tcattctaag
ccccttctcc aagttgcctc tccttatttc tccctgtctg
ccaaaaaatc tttcccagct cactaagtca gtctcacgca
gtcactcatt aacccacaat tcgatatcaa gcttaataaa
agatctttat tttcattaga tctgtgtgtt ggttttttgt
gtggtaacca cgtgcggacc gagcggccgc aggaacccct
agtgatggag ttggccactc cctctctgcg cgctcgctcg
ctcactgagg ccgggcgacc aaaggtcgcc cgacgcccgg
gctttgcccg ggcggcctca gtgagcgagc gagcgcgcag
ctgcctgcag gggcgcctga tgcggtattt tctccttacg
catctgtgcg gtatttcaca ccgcatacgt caaagcaacc
atagtacgcg ccctgtagcg gcgcattaag cgcggcgggt
gtggtggtta cgcgcagcgt gaccgctaca cttgccagcg
ccctagcgcc cgctcctttc gctttcttcc cttcctttct
cgccacgttc gccggctttc cccgtcaagc tctaaatcgg
gggctccctt tagggttccg atttagtgct ttacggcacc
togaccccaa aaaacttgat ttgggtgatg gttcacgtag
tgggccatcg ccctgataga cggtttttcg ccctttgacg
ttggagtcca cgttctttaa tagtggactc ttgttccaaa
ctggaacaac actcaaccct atctcgggct attcttttga
tttataaggg attttgccga tttcggccta ttggttaaaa
aatgagctga tttaacaaaa atttaacgcg aattttaaca
aaatattaac gtttacaatt ttatggtgca ctctcagtac
aatctgctct gatgccgcat agttaagcca gccccgacac
ccgccaacac ccgctgacgc gccctgacgg gcttgtctgc
tcccggcatc cgcttacaga caagctgtga ccgtctccgg
gagctgcatg tgtcagaggt tttcaccgtc atcaccgaaa
cgcgcgagac gaaagggcct cgtgatacgc ctatttttat
aggttaatgt catgataata atggtttctt agacgtcagg
tggcactttt cggggaaatg tgcgcggaac ccctatttgt
ttatttttct aaatacattc aaatatgtat ccgctcatga
gacaataacc ctgataaatg cttcaataat attgaaaaag
gaagagtatg agtattcaac atttccgtgt cgcccttatt
cccttttttg cggcattttg ccttcctgtt tttgctcacc
cagaaacgct ggtgaaagta aaagatgctg aagatcagtt
gggtgcacga gtgggttaca tcgaactgga tctcaacagc
ggtaagatcc ttgagagttt tcgccccgaa gaacgttttc
caatgatgag cacttttaaa gttctgctat gtggcgcggt
attatcccgt attgacgccg ggcaagagca actcggtcgc
cgcatacact attctcagaa tgacttggtt gagtactcac
cagtcacaga aaagcatctt acggatggca tgacagtaag
agaattatgc agtgctgcca taaccatgag tgataacact
gcggccaact tacttctgac aacgatcgga ggaccgaagg
agctaaccgc ttttttgcac aacatggggg atcatgtaac
togccttgat cottgggaac cggagctgaa tgaagccata
ccaaacgacg agcgtgacac cacgatgcct gtagcaatgg
caacaacgtt gogcaaacta ttaactggcg aactacttac
tctagcttcc cggcaacaat taatagactg gatggaggcg
gataaagttg caggaccact tctgcgctcg gcccttccgg
ctggctggtt tattgctgat aaatctggag ccggtgagcg
tgggtctcgc ggtatcattg cagcactggg gccagatggt
aagccctccc gtatcgtagt tatctacacg acggggagtc
aggcaactat ggatgaacga aatagacaga tcgctgagat
aggtgcctca ctgattaagc attggtaact gtcagaccaa
gtttactcat atatacttta gattgattta aaacttcatt
tttaatttaa aaggatctag gtgaagatcc tttttgataa
tctcatgacc aaaatccctt aacgtgagtt ttcgttccac
tgagcgtcag accccgtaga aaagatcaaa ggatcttctt
gagatccttt ttttctgcgc gtaatctgct gcttgcaaac
aaaaaaacca ccgctaccag cggtggtttg tttgccggat
caagagctac caactctttt tocgaaggta actggcttca
gcagagcgca gataccaaat actgtccttc tagtgtagcc
gtagttaggc caccacttca agaactctgt agcaccgcct
acatacctcg ctctgctaat cctgttacca gtggctgctg
ccagtggcga taagtcgtgt cttaccgggt tggactcaag
acgatagtta ccggataagg cgcagcggtc gggctgaacg
gggggttcgt gcacacagcc cagcttggag cgaacgacct
acaccgaact gagataccta cagcgtgagc tatgagaaag
cgccacgctt cccgaaggga gaaaggcgga caggtatccg
gtaagcggca gggtcggaac aggagagcgc acgagggagc
ttccaggggg aaacgcctgg tatctttata gtcctgtcgg
gtttcgccac ctctgacttg agcgtcgatt tttgtgatgc
tcgtcagggg ggcggagcct atggaaaaac gccagcaacg
cggccttttt acggttcctg gccttttgct ggccttttgc
tcacatgt (SEQ ID NO:1; TRAC-LHA-pAAV-
U6LbcrTRAC-DR-BbsI-EFS-CD22BBz-TRAC-RHA,
or pXD060).

In SEQ ID NO:1, nucleotides 1-141 correspond to an ITR, nucleotides 156-800 correspond to the TRAC left homology arm, nucleotides 816-1065 correspond to a human U6 promoter, nucleotides 1067-1087 correspond to a direct repeat, nucleotides 1088-1107 correspond to a TRAC targeting crRNA, nucleotides 1108-1128 correspond to a direct repeat, nucleotides 1129-1144 correspond to double BbsI sites, nucleotides 1198-1453 correspond to an EFS-NS promoter, nucleotides 1478-2938 correspond to a CD22BBz CAR, nucleotides 2945-2992 correspond to a polyA signal, nucleotides 2999-3657 correspond to the TRAC right homology arm, and nucleotides 3751-3891 correspond to an rTR.

[0107] An exemplary sequence of suitable AAV vector containing an anti-CD19 CAR is provided below:

cctgcaggcagctgcgcgctcgctcgctcactgaggccgcccgggcaaag
cccgggcgtcgggcgacctttggtcgcccggcctcagtgagcgagcgagc
gcgcagagagggagtggccaactccatcactaggggttcctgcggccgca
cgcgtgatgtaaggagctgctgtgacttgctcaaggccttatatcgagta
aacggtagtgctggggcttagacgcaggtgttctgatttatagttcaAAA
CCTCTATCAATGAGAGAGCAATCTCCTGGTAATGTGATAGATTTCCCAAC
TTAATGCCAACATACCATAAACCTCCCATTCTGCTAATGCCCAGCCTAAG
TTGGGGAGACCACTCCAGATTtCAAGATGTACAGTTTGCTTTGCTGGGCC
TTTTTCCCATGCCTGCCTTTACTCTGCCAGAGTTATATTGCTGGGGTTTT
GAAGAAGATCCTATTAAATAAAAGAATAAGCAGTATTATTAAGTAGCCCT
GCATTTCAGGTTTCCTTGAGTGGCAGGCCAGGCCTGGCCGTGAACGTTCA
CTGAAATCATGGCCTCTTGGCCAAGATTGATAGCTTGTGCCTGTCCCTGA
GTCCCAGTCCgTCACGAGCAGCTGGTTTCTAAtATGCTATTTCCCGTATA
AAGCATGAGACCGTGACTTGCCAGCCCCACAGAGCCCCGCCCTTGTCCAT
CACTGGCATCTGGACTCCAGCCTGGGTTGGGGCAAAGAGGGAAATGAGAT
CATGTCCTAACCCTGATCCTCTTGTCCCACAGATATCCAGAACCCTGACC
cgcgttAGCGctagaagagggcctatttcccatgattccttcatatttgc
atatacgatacaaggctgttagagagataattggaattaatttgactgta
aacacaaagatattagtacaaaatacgtgacgtagaaagtaataatttct
tgggtagtttgcagttttaaaattatgttttaaaatggactatcatatgc
ttaccgtaacttgaaagtatttcgatttcttggctttatatatcttGTGG
AAAGGACGAAACACCgTAATTTCTACTAAGTGTAGATGAGTCTCTCAGCT
GGTACACTAATTTCTACTAAGTGTAGATGGTCTTCgaGAAGACCTTTTTT
aagcttggcgtGGATCCGATATCaactagatcttgagacaaggtacctag
gtcttgaaaggagtgggaattggctccggtgcccgtcagtgggcagagcg
cacatcgcccacagtccccgagaaggtaaactgggaaagtgatgtcgtgt
actggctccgcctttttcccgagggtgggggagaaccgtatataagtgca
gtagtcgccgtgaacgttctttttcgcaacgggtttgccgccagaacaca
ggaccggttctagacgtacggccaccatggccttaccagtgaccgccttg
ctcctgccgctggccttgctgctccacgccgccaggccgGATTACAAAGA
CGATGACGATAAGgacatccagatgacacagactacatcctccctgtctg
cctctctgggagacagagtcaccatcagttgcagggcaagtcaggacatt
agtaaGtatttaaattggtatcagcagaaaccagatggaactgttaaact
cctgatctaccatacatcaagattacactcaggagtcccatcaaggttca
gtggcagtgggtctggaacagattattctctcaccattagcaacctggag
caagaagatattgccacttacttttgccaacagggtaatacgcttccgta
cacgttcggaggggggaccaagctggagatcacaggactgcaggagtcag
gacctggcctggtggcgccctcacagagcctgtccgtcacatgcactgtc
tcaggggtctcattacccgactatggtgtaagctggattcgccagcctcc
acgaaagggtctggagtggctgggagtaatatggggtagtgaaaccacat
actataattcagctctcaaatccagactgaccatcatcaaggacaactcc
aagagccaagttttcttaaaaatgaacagtctgcaaactgatgacacagc
catttactactgtgccaaacattattactacggtggtagctatgctatgg
actactggggccaaggaacctcagtcaccgtcAcctcaAccacgacgcca
gcgccgcgaccaccaacaccggcgcccaccatcgcgtcgcagcccctgTc
cctgcgcccagaggcatgccggccagcagcagggggcgcagtgcacacga
gggggctgGacttcgcctgtgatatctacatctgggcgcccttggccggg
acttgtggggtccttctcCtgtcactggttatcaccctttactgcaaacg
gggcagaaagaaactcctgtatatattcAaacaaccatttatgagaccag
tacaaactactcaagaggaagatggctgtagctgccgaTttccagaagaa
gaagaaggaggatgtgaactgagagtgaagttcagcaggagcgcagacGc
ccccgcgtaccagcagggccagaaccagctctataacgagctcaatctag
gacgaagaGaggagtacgatgttttggacaagCgacgtggccgggaccct
gagatggggggaaagccgAgaaggaagaaccctcaggaaggcctgtacaa
tgaactgcagaaagataagatggcggagGcctacagtgagattgggatga
aaggcgagcgccggaggggcaaggggcacgatggccttTaccagggtctc
agtacagccaccaaggacacctacgacgcccttcacatgcaggccctgCc
ccctcgctaaGCTAGCAATAAAAGATCTTTATTTTCATTAGATCTGTGTG
TTGGTTTTTTGTGTggtaccGAGAGACTCTAAATCCAGTGACAAGTCTGT
CTGCCTATTCACCGATTTTGATTCTCAAACAAATGTGTCACAAAGTAAGG
ATTCTGATGTGTATATCACAGACAAAACTGTGCTAGACATGAGGTCTATG
GACTTCAAGAGCAACAGTGCTGTGGCCTGGAGCAACAAATCTGACTTTGC
ATGTGCAAACGCCTTCAACAACAGCATTATTCCAGAAaACACCTTCTTCC
CCAGCCCAGGTAAGGGCAGCTTTGGTGCCTTCGCAGGCTGTTTCCTTGCT
TCAGGAATGGCCAGGTTCTGCCCAGAGCTCTGGTCAATGATGTCTAAAAC
TCCTCTGATTGGTGGTCTCGGCCTTATCCATTGCCACCAAAACCCTCTTT
TTACTAAGAAACAGTGAGCCTTGTTCTGGCAGTCCAGAGAATGACACGGa
AAAAAAGCAGATGAAGAGAAGGTGGCAGGAGAGGGCACGTGGCCCAGCCT
CAGTCTCTCCAACTGAGTTCCTGCCTGCCTGCCTTTGCTCAGACTGTTTG
CCCCTTACTGCTCTTCTAGGCCTCATTCTAAGCCCCTTCTCCAAGTTGCC
TCTCCTTATTTCTCCCTGTCTGCCAAAAAATCTTTCCCAGCTCACTAAGT
CAGTCTCACGCAGTCACTCATTAACCCACAATTCgatatcaagcttAATA
AAAGATCTTTATTTTCATTAGATCTGTGTGTTGGTTTTTTGTGTggtaac
cacgtgcggaccgagcggccgcaggaacccctagtgatggagttggccac
tccctctctgcgcgctcgctcgctcactgaggccgggcgaccaaaggtcg
cccgacgcccgggctttgcccgggcggcctcagtgagcgagcgagcgcgc
agctgcctgcaggggcgcctgatgcggtattttctccttacgcatctgtg
cggtatttcacaccgcatacgtcaaagcaaccatagtacgcgccctgtag
cggcgcattaagcgcggcgggtgtggtggttacgcgcagcgtgaccgcta
cacttgccagcgccctagcgcccgetccagctctaaatcgggggctccct
ttagggttccgatttagtgctttacggcacctcgaccccaaaaaacttga
tttgggtgatggttcacgtagtgggccatcgccctgatagacggtttttc
gccctttgacgttggagtccacgttctttaatagtggactcttgttccaa
actggaacaacactcaaccctatctcgggctattcttttgatttataagg
gattttgccgatttcggcctattggttaaaaaatgagctgatttaacaaa
aatttaacgcgaattttaacaaaatattaacgtttacaattttatggtgc
actctcagtacaatctgctctgatgccgcatagttaagccagccccgaca
cccgccaacacccgctgacgcgccctgacgggcttgtotgctcccggcat
ccgcttacagacaagctgtgaccgtctccgggagctgcatgtgtcagagg
ttttcaccgtcatcaccgaaacgcgcgagacgaaagggcctcgtgatacg
cctatttttataggttaatgtcatgataataatggtttcttagacgtcag
gtggcacttttcggggaaatgtgcgcggaacccctatttgtttatttttc
taaatacattcaaatatgtatccgctcatgagacaataaccctgataaat
gcttcaataatattgaaaaaggaagagtatgagtattcaacatttccgtg
tcgcccttattcccttttttgcggcattttgccttcctgtttttgctcac
ccagaaacgctggtgaaagtaaaagatgctgaagatcagttgggtgcacg
agtgggttacatcgaactggatctcaacagcggtaagatccttgagagtt
ttcgccccgaagaacgttttccaatgatgagcacttttaaagttctgcta
tgtggcgcggtattatcccgtattgacgccgggcaagagcaactcggtcg
ccgcatacactattctcagaatgacttggttgagtactcaccagtcacag
aaaagcatcttacggatggcatgacagtaagagaattatgcagtgctgcc
ataaccatgagtgataacactgcggccaacttacttctgacaacgatcgg
aggaccgaaggagctaaccgcttttttgcacaacatgggggatcatgtaa
ctcgccttgatcgttgggaaccggagctgaatgaagccataccaaacgac
gagcgtgacaccacgatgcctgtagcaatggcaacaacgttgcgcaaact
attaactggcgaactacttactctagcttcccggcaacaattaatagact
ggatggaggcggataaagttgcaggaccacttctgcgctcggcccttccg
gctggctggtttattgctgataaatctggagccggtgagcgtgggtctcg
cggtatcattgcagcactggggccagatggtaagccctcccgtatcgtag
ttatctacacgacggggagtcaggcaactatggatgaacgaaatagacag
atcgctgagataggtgcctcactgattaagcattggtaactgtcagacca
agtttactcatatatactttagattgatttaaaacttcatttttaattta
aaaggatctaggtgaagatcctttttgataatctcatgaccaaaatccct
taacgtgagttttcgttccactgagcgtcagaccccgtagaaaagatcaa
aggatcttcttgagatcctttttttctgcgcgtaatctgctgcttgcaaa
caaaaaaaccaccgctaccagcggtggtttgtttgccggatcaagagcta
ccaactctttttccgaaggtaactggcttcagcagagcgcagataccaaa
tactgtccttctagtgtagccgtagttaggccaccacttcaagaactctg
tagcaccgcctacatacctcgctctgctaatcctgttaccagtggctgct
gccagtggcgataagtcgtgtcttaccgggttggactcaagacgatagtt
accggataaggcgcagcggtcgggctgaacggggggttcgtgcacacagc
ccagcttggagcgaacgacctacaccgaactgagatacctacagcgtgag
ctatgagaaagcgccacgcttcccgaagggagaaaggcggacaggtatcc
ggtaagcggcagggtcggaacaggagagcgcacgagggagcttccagggg
gaaacgcctggtatctttatagtcctgtcgggtttcgccacctctgactt
gagcgtcgatttttgtgatgctcgtcaggggggcggagcctatggaaaaa
cgccagcaacgcggcctttttacggttcctggccttttgctggccttttg
ctcacatgt (SEQ ID NO: 2; TRAC-LHA-pAAV-U6LbcrTRAC-
DR-BbsI-EFS-CD19BBz-TRAC-RHA or pXD071).

The vector sequence of SEQ ID NO:2 generally parallels that of SEQ ID NO:1 with the CD22BBz domain of nucleotides 1478-2938 of SEQ ID NO:1 substituted with the CD19BBz domain. Most particularly, nucleotides 1,478-2,255 of SEQ ID NO:1 encoding the anti-CD22 antigen-binding domain are substituted with an anti-CD19 antigen-binding domain in SEQ ID NO:2.

[0108] Although SEQ ID NO:1 and SEQ ID NO:2 contain the sequences for a CD22 CAR and a CD19 CAR, respectively, it is understood that any CAR of interest can be alternatively included, e.g., as illustrated above with SEQ ID NOS:1 and 2. Additionally, these vectors can be modified to contain any guide RNA(s) of interest. For example, the guide RNA targeting the TRAC locus (crTRAC) can be substituted, sequences encoding additional guide RNAs, such as any one of SEQ ID NOs:3-12,134, can be included in the vector (e.g., at the BbsI site), or combinations thereof. Thus, SEQ ID NO:1 or SEQ ID NO:2 are expressly disclosed with or without the sequence encoding the TRAC targeting crRNA, with or without one or more additional crRNA encoding sequences optionally inserted at the BbsI cloning site, and/or the existing CAR encoding sequence or another CAR encoding sequence substituted therefore. In some embodiments, suitable vectors include variants having about 50%, 55%, 60%, 65%, 70%, 75%, 80%, 85%, 90%, 95%, 96%, 97%, 98%, 99%, or more sequence identity to SEQ ID NO:1 or SEQ ID NO:2, or any of the foregoing variations thereof.

[0109] The AAV vector used in the compositions and methods can be a naturally occurring serotype of AAV including, but not limited to, AAV1, AAV2, AAV3, AAV4, AAV5, AAV6, AAV7, AAV8, AAV9, AAV10, AAV11, AAV12, artificial variants such as AAV.rhlO, AAV.rh32/33, AAV.rh43, AAV.rh64R1, rAAV2-retro, AAV-DJ, AAV-PHP.B, AAV-PHP.S, AAV-PHP.eB, or other natural or engineered versions of AAV. In preferred embodiments, the AAV used in the compositions and methods is AAV6 or AAV9.

[0110] Twelve natural serotypes of AAV have thus far been identified, with the best characterized and most commonly used being AAV2. These serotypes differ in their tropism, or the types of cells they infect, making AAV a very useful system for preferentially transducing specific cell types. For example, AAV serotypes 1, 2, 5 or a hybrid capsid AAV1, AAV2, AAV5 or any combination thereof can be used for targeting brain or neuronal cells; AAV4 can be selected for targeting cardiac cells. AAV8 is useful for delivery to the liver cells. Researchers have further refined the tropism of AAV through pseudotyping, or the mixing of a capsid and genome from different viral serotypes. These serotypes are denoted using a slash, so that AAV2/5 indicates a virus containing the genome of serotype 2 packaged in the capsid from serotype 5. Use of these pseudotyped viruses can improve transduction efficiency, as well as alter tropism. For example, AAV2/5 targets neurons that are not efficiently transduced by AAV2/2, and is distributed more widely in the brain, indicating improved transduction efficiency.

[0111] Other engineered AAVs have also been developed and can be used for the purpose of introducing transgenes, and in the compositions and methods. These are well known in the art and one of skill in the art would be able to determine the optimal AAV serotype to be used for the respective application.

[0112] crRNAs/Guide RNAs

[0113] The gene editing compositions include one or more crRNAs (also referred to as guide RNAs) that direct the RNA-guided endonuclease to one or more target genes/sites. Preferably, the crRNAs are provided in the AAV vector (e.g., an AAV6 or AAV9 vector). The crRNAs can be provided individually or together in the form of a crRNA expression cassette. The guide RNA sequence can be configured as a single sequence or as a combination of one or more different sequences, e.g., a multiplex configuration (referred to as an array). For example, in the context of a viral vector, multiple crRNAs/gRNAs can be tandemly arranged, optionally separated by a nucleotide sequence such as a direct repeat in the form of a crRNA expression cassette. The crRNA expression cassette contains one or more regulatory sequences (e.g., U6 promoter) operationally linked to the sequences encoding the crRNAs. For example, the crRNA expression cassette can include multiple gRNAs under the control of a single promoter (e.g., U6 promoter) designed in an array format such that multiple gRNA sequences can be simultaneously expressed. In some embodiments, each individual crRNA or gRNA guide sequence can target a different target. The crRNA expression cassette can encode two or more (e.g., 2, 3, 4, 5, or more) crRNAs that direct the endonuclease to different target genes or target sites (e.g., 2, 3, 4, 5, or more). In preferred embodiments, the crRNA expression cassette encodes two guide RNAs.

[0114] The crRNAs/gRNAs can each individually be contained in a composition and introduced to a cell individually or collectively. Alternatively, these components can be provided in a single composition for introduction to a cell. Similarly to the mRNA encoding the RNA-guided endonuclease, the crRNAs or guide RNAs (gRNAs) can be introduced to the cell by any suitable means such as via viral or non-viral techniques. For example, the crRNAs can be provided in a viral vector (e.g., a retrovirus such as a lentivirus, adenovirus, poxvirus, Epstein-Barr virus, adeno-associated virus (AAV), etc.) or by transfection, electroporation or nucleofection for example.

[0115] In contrast to Cas9, Cpf1 is tracrRNA independent and requires only an approximately 42 nucleotide long crRNA, which has 20-23 nucleotides at its 3′ end complementary to the protospacer of the target DNA sequence. Cpf1-associated CRISPR arrays are processed into mature crRNAs without the requirement of an additional tracrRNA and when complexed with Cpf1, the Cpf1p-crRNA complex is sufficient to efficiently cleave target DNA by itself. The crRNAs include a spacer sequence (or guide sequence) and a direct repeat sequence. The seed sequence, is approximately within the first 5 nucleotides on the 5′ end of the spacer sequence and mutations within the seed sequence adversely affect cleavage activity of the Cpf1 effector protein complex.

[0116] The term “guide RNA,” refers to the polynucleotide sequence containing a putative or identified crRNA sequence or guide sequence. The guide RNA can be any polynucleotide sequence having sufficient complementarity with a target nucleic acid sequence to hybridize with the target nucleic acid sequence and direct sequence-specific binding of an RNA-guided endonuclease to the target nucleic acid sequence. In some embodiments, the degree of complementarity between a guide sequence and its corresponding target sequence, when optimally aligned using a suitable alignment algorithm, is about or more than about 50%, 60%, 70%, 75%, 80%, 85%, 90%, 95%, 97.5%, 99%, or more. Optimal alignment can be determined with the use of any suitable algorithm for aligning sequences, non-limiting example of which include the Smith-Waterman algorithm, the Needleman-Wunsch algorithm, algorithms based on the Burrows-Wheeler Transform (e.g. the Burrows Wheeler Aligner), ClustalW, Clustal X, BLAT, Novoalign (Novocraft Technologies, ELAND (Illumina, San Diego, CA), SOAP (available at soap.genomics.org.cn), and Maq (available at maq.sourceforge.net).

[0117] Guide RNA (gRNA) sequences for use in the compositions and methods can be sense or anti-sense sequences. The specific sequence of the gRNA can vary, but, regardless of the sequence, useful guide RNA sequences will be those that minimize off-target effects and achieve high efficiency alteration of the targeted gene or target site. The length of the guide RNA sequence can vary from about 10 to about 60 or more nucleotides, for example about 10, about 11, about 12, about 13, about 14, about 15, about 16, about 17, about 18, about 19, about 20, about 21, about 22, about 23, about 24, about 25, about 26, about 27, about 28, about 29, about 30, about 31, about 32, about 33, about 34, about 35, about 36, about 37, about 38, about 39, about 40, about 45, about 50, about 55, about 60 or more nucleotides. The ability of a guide sequence to direct sequence-specific binding of a nucleic acid-targeting complex to a target sequence can be assessed by any suitable assay.

[0118] In some embodiments, the crRNA sequence has one or more stem loops or hairpins and is 30 or more nucleotides in length, 40 or more nucleotides in length, or 50 or more nucleotides in length. In certain embodiments, the crRNA sequence is between 42 and 44 nucleotides in length. In some embodiments, the crRNA contains about 19 nucleotides of a direct repeat and between 23 and 25 nucleotides of spacer sequence

[0119] In the context of formation of a CRISPR complex, “target sequence” refers to a sequence to which a guide sequence is designed to target, e.g. have complementarity, where hybridization between a target sequence and a guide sequence promotes the formation of a CRISPR complex. The section of the guide sequence through which complementarity to the target sequence is important for cleavage activity is referred to as the seed sequence. A target sequence can comprise any polynucleotide, such as DNA or RNA polynucleotides and is comprised within a target locus of interest.

[0120] It is believed that the target sequence should be associated with a PAM (protospacer adjacent motif); that is, a short sequence recognized by the CRISPR complex. The precise sequence and length requirements for the PAM differ depending on the CRISPR enzyme used, but PAMs are typically 2-5 base pair sequences adjacent to the protospacer (also referred to as target sequence). The skilled person will be able to identify further PAM sequences for use with a given RNA-guided endonuclease. Further, engineering of the PAM Interacting (PI) domain of an RNA-guided endonuclease can allow programing of PAM specificity to improve target site recognition fidelity, and increase the versatility of the Cas, e.g. Cpf1, genome engineering platform. Cas proteins, can be engineered to alter their PAM specificity, for example as described in Kleinstiver, B P., et al., Nature., 523(7561):481-5 (2015).

[0121] There are many resources available for helping practitioners determine suitable target sites once a desired DNA target sequence or target gene is identified. For example, numerous public resources, including a bioinformatically generated list of about 190,000 potential guide RNAs, targeting more than 40% of human exons, are available to aid practitioners in selecting target sites and designing the associated guide RNA to affect a nick or double strand break at the site. See also, crispr.u-psud.fr/, a tool designed to help scientists find CRISPR targeting sites in a wide range of species and generate the appropriate crRNA sequences.

[0122] The guide RNA can be a sequence complementary to a coding or a non-coding sequence (e.g., a target sequence, target site, or target gene). The gRNA sequences can be complementary to either the sense or anti-sense strands of the target sequences. They can include additional 5′ and/or 3′ sequences that may or may not be complementary to a target sequence. They can have less than 100% complementarity to a target sequence, for example 50%, 60%, 70%, 75%, 80%, 85%, 90%, or 95% complementarity.

[0123] Upon formation of a ribonucleoprotein complex with the crRNA, the RNA-guided endonuclease localizes to a sequence (e.g., a target sequence, target site, or target gene) and causes disruption of a target gene and/or one or more homology arms can mediate targeted integration of a transgene at a target site via HDR. A target site can be within the locus of the disrupted gene or at a locus different from the disrupted gene. For example, a target site can overlap with a portion of a gene such as, an enhancer, promoter, intron, exon, or untranslated region (UTR).

[0124] Exemplary Target Genes/Target Sites

[0125] The gene editing compositions are generally applicable to the targeting and/or alteration (e.g., disruption) of any sequence of interest in the genome, including non-coding and coding regions. One of skill in the art would understand that the targeted sequences would depend on the application for which genome modification is being performed and appropriate crRNAs/gRNAs would be designed accordingly. For example, in the context of CAR T cells, it is desirable to generate standardized therapy in which allogeneic therapeutic cells are administered to a subject in need thereof. By allogeneic is meant that the cells used for treating patients are not originating from said patient but from a donor belonging to the same species, and as such, are genetically dissimilar. However, host versus graft rejection (HvG) and graft versus host disease (GvHD) severely limit their use. In these contexts, it is desirable to generate CAR T cells in which proteins involved in HvG and GvHD have been disrupted. Accordingly, TCR alpha, TCR beta, one or more HLA genes, one or more major histocompatibility complex (MHC) genes, or combinations thereof, can be targeted by the crRNAs/gRNAs.

[0126] Immune checkpoints proteins are a group of molecules expressed by T cells that effectively serve as “brakes” to down-modulate or inhibit an immune response. Immune checkpoint molecules include, but are not limited to Programmed Death 1 (PD-1, also known as PDCD1 or CD279, accession number: NM_005018), Cytotoxic T-Lymphocyte Antigen 4 (CTLA-4, also known as CD152, GenBank accession number AF414120.1), LAG3 (also known as CD223, accession number: NM_002286.5), Tim3 (also known as HAVCR2, GenBank accession number: JX049979.1), BTLA (also known as CD272, accession number: NM_181780.3), BY55 (also known as CD160, GenBank accession number: CR541888.1), TIGIT (also known as IVSTM3, accession number: NM_173799), LAIR1 (also known as CD305, GenBank accession number: CR542051.1, SIGLEC10 (GenBank accession number: AY358337.1), 2B4 (also known as CD244, accession number: NM_001 166664.1), PPP2CA, PPP2CB, PTPN6, PTPN22, CD96, CRTAM, SIGLEC7, SIGLEC9, TNFRSF10B, TNFRSF10A, CASP8, CASP10, CASP3, CASP6, CASP7, FADD, FAS, TGFBRII, TGFRBRI, SMAD2, SMAD3, SMAD4, SMAD10, SKI, SKIL, TGIF1, M ORA, IL10RB, HM0X2, IL6R, IL6ST, EIF2AK4, CSK, PAG1, SIT1, F0XP3, PRDM1, BATF, GUCY1A2, GUCY1A3, GUCY1 B2, GUCY1 B3 which directly inhibit immune cells. For example, CTLA-4 is a cell-surface protein expressed on certain CD4 and CD8 T cells; when engaged by its ligands (B7-1 and B7-2) on antigen presenting cells, T-cell activation and effector function are inhibited. Thus, the gene editing compositions can be used to target and inactivate any immune check-point protein, including but not limited to, the aforementioned immune check-point proteins, such as PD1 and/or CTLA-4.

[0127] Any gene in the cell's genome can be a target gene or contain a target site. The gene can have a known or putative role in any biological process or molecular function of interest. In some embodiments, a gene with a known or putative role in T cell exhaustion, T cell proliferation, T cell co-stimulation, memory T cell differentiation, T cell receptor signaling, epigenetic regulation, adaptive immune response, immune response to tumor cells, other immune functions, or combinations thereof could be a target gene or target site. Genes involved in such and other biological processes are known and can be determined by one of skill in the art. For example, the Gene Ontology (GO) database and the Molecular Signatures Database (MSigDB) provide lists of genes and/or gene products associated with various biological functions. In some embodiments, a gene listed in Table 2 or Table 3 (provided in Example 1) could be a target gene or target site. In some embodiments, the target gene or target site is a gene or site targeted by one or more guide RNAs selected from the Rene library (SEQ ID NOs:3-4,087) and/or the Descartes library (SEQ ID NOs:4,088-12,134).

[0128] In some embodiments, a targeted gene or target site is selected from PRDM1, DPF3, SLAMF1, TE72, HFE, PEL11, PDCD1, HAVCR2/TIM3, TET2, NR4A2, LAIR1, and USB1. In some embodiments, exemplary target genes or target sites include, but are not limited to, PDCD1 and TRAC.

### Chimeric Antigen Receptors (CAR)

[0129] Provided as part of the gene editing compositions are one or more CAR expression cassettes containing one or more CARs (e.g., 1, 2, 3, 4, 5, or more) operationally linked to regulatory sequences. Such regulatory sequences can include, without limitation, a promoter, splice acceptor, IRES, 2A peptide, triple helix, polyadenylation signal, or combinations thereof. Upon integration at a target site, the one or more CARs are expressed within the recipient cell (e.g., T cell).

[0130] Immunotherapy using T cells genetically engineered to express a chimeric antigen receptor (CAR) is rapidly emerging as a promising new treatment for haematological and non-haematological malignancies. CARs are engineered receptors that possess both antigen-binding and T-cell-activating functions. Based on the location of the CAR in the membrane of the T cell, the CAR can be divided into three main distinct domains, including an extracellular antigen-binding domain, followed by a space region, a transmembrane domain, and the intracellular signaling domain. The antigen-binding moiety, most commonly derived from variable regions of immunoglobulins, is composed of VH and VL chains that are joined up by a linker to form the so-called “scFv.” The segment interposing between the scFv and the transmembrane domain is a “spacer domain,” that in some embodiments, is the constant IgG1 hinge-CH2-CH3 Fc domain. In some cases, the spacer domain and the transmembrane domain are derived from CD8. The intracellular signaling domains mediating T cell activation include a CD3ζ co-receptor signaling domain derived from C-region of the TCR α and β chains and one or more costimulatory domains.

[0131] CARs can be used in order to generate immunoresponsive cells, such as T cells, specific for selected targets, such as malignant cells, with a wide variety of receptor chimera constructs having been described (see U.S. Pat. Nos. 5,843,728; 5,851,828; 5,912,170; 6,004,811; 6,284,240; 6,392,013; 6,410,014; 6,753,162; 8,211,422; and, PCT Publication WO9215322). Alternative CAR constructs can be characterized as belonging to successive generations. First-generation CARs typically consist of a single-chain variable fragment of an antibody specific for an antigen, for example comprising a VL linked to a VH of a specific antibody, linked by a flexible linker, for example by a CD8a hinge domain and a CD8a transmembrane domain, to the transmembrane and intracellular signaling domains of either CD3ζ or FcRγ (scFv-CD3ζ or scFv-FcRγ; see U.S. Pat. Nos. 7,741,465; 5,912,172; 5,906,936). Second-generation CARs incorporate the intracellular domains of one or more costimulatory molecules, such as CD28, OX40 (CD134), or 4-1BB (CD137) within the endodomain (for example scFv-CD28/OX40/4-1BB-CD3ζ; see U.S. Pat. Nos. 8,911,993; 8,916,381; 8,975,071; 9,101,584; 9,102,760; 9,102,761). Third-generation CARs include a combination of costimulatory endodomains, such a CD3ζ-chain, CD97, GDI 1a-CD18, CD2, ICOS, CD27, CD154, CDS, OX40, 4-1BB, or CD28 signaling domains (for example scFv-CD28-4-1BB-CD3ζ or scFv-CD28-OX40-CD3ζ; see U.S. Pat. Nos. 8,906,682; 8,399,645; 5,686,281; PCT Publication No. WO2014134165; PCT Publication No. WO2012079000). Alternatively, costimulation can be orchestrated by expressing CARs in antigen-specific T cells, chosen so as to be activated and expanded following engagement of their native αβTCR, for example by antigen on professional antigen-presenting cells, with attendant costimulation.

[0132] In some embodiments, the CAR targets (e.g., recognizes and/or binds) one or more antigens specific for cancer, an inflammatory disease, a neuronal disorder, HIV/AIDS, diabetes, a cardiovascular disease, an infectious disease, an autoimmune disease, or combinations thereof. One of skill in the art, based on general knowledge in the field and/or routine experimentation would be able to determine the appropriate antigen to be targeted by a CAR for a specific disease, disorder or condition.

[0133] Exemplary antigens specific for cancer that could be targeted by the CAR include, but are not limited to, 4-1BB, 5T4, adenocarcinoma antigen, alpha-fetoprotein, BAFF, B-lymphoma cell, C242 antigen, CA-125, carbonic anhydrase 9 (CA-IX), C-MET, CCR4, CD 152, CD 19, CD20, CD200, CD22, CD221, CD23 (IgE receptor), CD28, CD30 (TNFRSF8), CD33, CD4, CD40, CD44 v6, CD51, CD52, CD56, CD74, CD80, CEA, CNT0888, CTLA-4, DR5, EGFR, EpCAM, CD3, FAP, fibronectin extra domain-B, folate receptor 1, GD2, GD3 ganglioside, glycoprotein 75, GPNMB, HER2/neu, HGF, human scatter factor receptor kinase, IGF-1 receptor, IGF-I, IgG1, L1-CAM, IL-13, IL-6, insulin-like growth factor I receptor, integrin α5β1, integrin αvβ3, MORAb-009, MS4A1, MUC1, mucin CanAg, N-glycolylneuraminic acid, NPC-1C, PDGF-R a, PDL192, phosphatidylserine, prostatic carcinoma cells, RANKL, RON, ROR1, SCH 900105, SDC1, SLAMF7, TAG-72, tenascin C, TGF beta 2, TGF-β, TRAIL-R1, TRAIL-R2, tumor antigen CTAA16.88, VEGF-A, VEGFR-1, VEGFR2, vimentin, and combinations thereof.

[0134] Exemplary antigens specific for an inflammatory disease that could be targeted by the CAR include, but are not limited to, AOC3 (VAP-1), CAM-3001, CCL11 (eotaxin-1), CD 125, CD 147 (basigin), CD 154 (CD40L), CD2, CD20, CD23 (IgE receptor), CD25 (a chain of IL-2 receptor), CD3, CD4, CD5, IFN-α, IFN-γ, IgE, IgE Fc region, IL-1, IL-12, IL-23, IL-13, IL-17, IL-17A, IL-22, IL-4, IL-5, IL-5, IL-6, IL-6 receptor, integrin a4, integrin α4β7, Lama glama, LFA-1 (CD11a), MEDI-528, myostatin, OX-40, rhuMAb β7, scleroscin, SOST, TGF beta 1, TNF-a, VEGF-A, and combinations thereof.

[0135] Exemplary antigens specific for a neuronal disorder that could be targeted by the CAR include, but are not limited to, beta amyloid, MABT5102A, and combinations thereof.

[0136] Exemplary antigens specific for diabetes that could be targeted by the CAR include, but are not limited to, L-I β, CD3, and combinations thereof.

[0137] Exemplary antigens specific for a cardiovascular disease that could be targeted by the CAR include, but are not limited to, C5, cardiac myosin, CD41 (integrin alpha-lib), fibrin II, beta chain, ITGB2 (CD 18), sphingosine-1-phosphate, and combinations thereof.

[0138] Exemplary antigens (or antigen associated viruses) specific for an infectious disease that could be targeted by the CAR include, but are not limited to, anthrax toxin, CCR5, CD4, clumping factor A, cytomegalovirus, cytomegalovirus glycoprotein B, endotoxin, Escherichia coli, hepatitis B surface antigen, hepatitis B virus, HIV-1, Hsp90, Influenza A hemagglutinin, lipoteichoic acid, Pseudomonas aeruginosa, rabies virus glycoprotein, respiratory syncytial virus, TNFα, and combinations thereof.

[0139] In preferred embodiments, the CAR targets one or more antigens selected from AFP, AKAP-4, ALK, Androgen receptor, B7H3, BCMA, Bcr-Abl, BORIS, Carbonic, CD123, CD133, CD44, GD2, Claudins, CD138, CD174, CD19, CD20, CD22, CD30, CD33, CD38, CD80, CD86, CEA, CEACAM5, CEACAM6, Cyclin, CYP1B1, EBV, EGFR, EGFR806, EGFRvIII, EpCAM, EphA2, ERG, ETV6-AML, FAP, Fos-related antigen1, Fucosyl, fusion, GD2, GD3, GloboH, GM3, gp100, GPC3, HER-2/neu, HER2, HMWMAA, HPV E6/E7, hTERT, Idiotype, IL12, IL13RA2, IM19, IX, LCK, Legumain, lgK, LMP2, MAD-CT-1, MAD-CT-2, MAGE, MelanA/MART1, Mesothelin, MET, ML-IAP, MUC1, mutant p53, MYCN, NA17, NKG2D, NKG2D-L, NY-BR-1, NY-ESO-1, OY-TES1, p53, Page4, PAP, PAX3, PAX5, PD-L1, PDGFR-β, PLAC1, Polysialic acid Proteinase3 (PR1), PSA, PSCA, PSMA, mutant Ras, RGS5, RhoC, ROR1, SART3, sLe(a), Sperm protein 17, SSX2, STn, Survivin, Tie2, Tn, TRP-2, Tyrosinase, VEGFR2, WT1, and XAGE.

[0140] Preferably, the CAR can be an anti-CD19 CAR (e.g., CD19BBz) or an anti-CD22 CAR (e.g., CD22BBz). In some embodiments, the CAR can be bispecific. In some embodiments, the CAR can be multivalent. Bispecific or multi-specific (multivalent) CARs, e.g., including, but not limited to, CARs described in WO 2014/4011988 and US20150038684, are contemplated for use in the methods and compositions.

[0141] In some embodiments, the CAR expression cassette alternatively or additionally, contains a gene of interest, such as a reporter gene. A reporter gene includes any gene that could be used as an indicator of a successful event, e.g., transfection, transduction, and/or recombination. Reporter genes can be fused to regulatory sequences or genes of interest to report expression location or levels, or serve as controls, for example, standardizing transfection efficiencies. Reporter genes include genes that code for fluorescent protein and enzymes that convert invisible substrates to luminescent or colored products. Reporter genes also include selectable markers that confer the ability to grow in the presence of toxic compounds such as antibiotics or herbicides, which would otherwise kill or compromise the cell. A selectable marker can also confer an ability to utilize a compound, for example, an unusual carbohydrate or amino acid. Non-limiting examples of selectable markers include genes that confer resistance to Blasticidin, G418/Geneticin, Hygromycin B, Puromycin, or Zeocin.

[0142] The CAR expression cassettes can each individually be contained in a composition and introduced to a cell individually or collectively. Alternatively, these components can be provided in a single composition for introduction to a cell. Preferably, the one or more CAR expression cassettes are provided in a single viral vector, e.g., an AAV vector packaged in AAV serotypes such as AAV6 or AAV9 vector.

[0143] Homology Arms

[0144] The gene editing compositions can be used to introduce targeted double-strand breaks (DSB) in an endogenous DNA sequence. The DSB activates cellular DNA repair pathways, which can be harnessed to achieve desired DNA sequence modifications near the break site. In particular embodiments, homologous recombination with one or more homologous sequences is promoted at the site of the DSB, in order to introduce a sequence of interest, such as one or more crRNAs and/or CARs.

[0145] In some embodiments, the AAV vector contains one or more homologous sequences (referred to as homology arms) to permit homologous recombination, within or near a target sequence nicked or cleaved by an RNA-guided endonuclease as a part of a nucleic acid-targeting complex. A homology arm can be of any suitable length, such as about or more than about 10, 15, 20, 25, 50, 75, 100, 150, 200, 500, 1000, or more nucleotides in length. In some embodiments, the homology arm is complementary or homologous to a portion of a target sequence. When optimally aligned, a homology arm might overlap with one or more nucleotides of a target sequences (e.g., about or more than about 1, 5, 10, 15, 20, 25, 30, 35, 40, 45, 50, 60, 70, 80, 90, 100 or more nucleotides). In some embodiments, when a homology arm and a polynucleotide including a target sequence are optimally aligned, the nearest nucleotide of the homology arm is within about 1, 5, 10, 15, 20, 25, 50, 75, 100, 200, 300, 400, 500, 1000, 5000, 10000, or more nucleotides from the target sequence.

[0146] In particular embodiments, the AAV template contains the following components: a 5′ homology arm, a replacement sequence (e.g., crRNA expression cassette and/or CAR expression cassette), and a 3′ homology arm. The homology arms provide for recombination into the chromosome, thus replacing a portion of the endogenous genomic sequence with the replacement sequence. In some embodiments, the homology arms flank the most distal cleavage sites. In some embodiments, the 3′ end of the 5′ homology arm is the position next to the 5′ end of the replacement sequence. In some embodiments, the 5′ homology arm can extend at least 10, 20, 30, 40, 50, 100, 200, 300, 400, 500, 600, 700, 800, 900, 1000, 1500, or 2000 nucleotides 5′ from the 5′ end of the replacement sequence. In some embodiments, the 5′ end of the 3′ homology arm is the position next to the 3′ end of the replacement sequence. In some embodiments, the 3′ homology arm can extend at least 10, 20, 30, 40, 50, 100, 200, 300, 400, 500, 600, 700, 800, 900, 1000, 1500, or 2000 nucleotides 3′ from the 3′ end of the replacement sequence.

[0147] In some embodiments, the 5′ and 3′ homology arms are homologous to the TRAC locus, for example the first exon of the TRAC locus. Other loci to which the homology arms can be homologous include, but are not limited to, other TCR loci such as TRBC1, TRBC2, TRAV1-1, and TRBV1; immune genes such as PD-1 and B2M; safe harbors such as AAVS1; intergenic regions, and other genomic regions.

[0148] In homology-directed repair (HDR), a donor polynucleotide with homology to the cleaved target DNA sequence is used as a template for repair of the cleaved target DNA sequence, resulting in the transfer of genetic information from a donor polynucleotide to the target DNA. As such, new nucleic acid material can be inserted/copied into the site. By a “donor sequence” or “donor polynucleotide” or “donor oligonucleotide” it is meant a nucleic acid sequence to be inserted at the cleavage site (e.g., crRNA expression cassette and/or CAR expression cassette). The donor polynucleotide typically contains sufficient homology to a genomic sequence at the cleavage site, e.g., about 70%, 75%, 80%, 85%, 90%, 95%, or 100% homology with the nucleotide sequences flanking the cleavage site, e.g., within about 50 bases or less of the cleavage site, e.g., within about 30 bases, within about 15 bases, within about 10 bases, within about 5 bases, or immediately flanking the cleavage site, to support homology-directed repair between it and the genomic sequence to which it bears homology. The donor sequence is typically not identical to the genomic sequence that it replaces. Rather, the donor sequence may contain at least one or more single base changes, insertions, deletions, inversions or rearrangements with respect to the genomic sequence, so long as sufficient homology is present to support homology-directed repair. In some embodiments, the donor sequence includes a non-homologous sequence (e.g., crRNA expression cassette and/or CAR expression cassette) flanked by two regions of homology, such that homology-directed repair between the target DNA region and the two flanking sequences results in insertion of the non-homologous sequence at the target region.

[0149] In some embodiments, the sequence containing the one or more homology arms and replacement sequence (referred to hereafter as HDR template) is single stranded or double stranded. In some embodiments, the HDR template is DNA, e.g., double stranded DNA or single stranded DNA. In some embodiments, the HDR template alters the structure of the target position by participating in homologous recombination. In some embodiments, the HDR template alters the sequence of the target position. In some embodiments, the HDR template results in the incorporation of a modified, or non-naturally occurring nucleotide sequence into the target nucleic acid. An HDR template having homology with a target position in a target gene can be used to alter the structure of a target sequence. The HDR template can include sequence which results in: a change in sequence of 1, 2, 3, 4, 5, 6, 7, 8, 9, 10, 11, 12, 13, 14, 15, 20, 30, 40, 50, 60, 70, 80, 90, 100, or more nucleotides of the target sequence.

[0150] B. Cells to be Modified and/or Screened

[0151] The gene editing compositions and methods can be used to achieve genomic modification and subsequent screening of any cell type. For example, the cell can be a prokaryotic or eukaryotic cell. The cell can be a mammalian cell. The mammalian cell can be human or non-human mammal, e.g., primate, bovine, ovine, porcine, canine, rodent, monkey, rat, or mouse cell. The cell can be a non-mammalian eukaryotic cell such as poultry bird (e.g., chicken), vertebrate fish (e.g., salmon) or shellfish (e.g., oyster, claim, lobster, shrimp) cell. The cell can also be a plant cell.

[0152] In preferred embodiments, the cell is a human cell including, but not limited to, skin cells, lung cells, heart cells, kidney cells, pancreatic cells, muscle cells, neuronal cells, human embryonic stem cells, blood cells (e.g., white blood cells), and pluripotent stem cells. More preferably, the cell to be modified can be an immune cell, such as, T cells (e.g., CD8+ T cells such as effector T cells, memory T cells, central memory T cells, and effector memory T cells; or CD4+ T cells such as Th1 cells, Th2 cells, Th3 cells, Th9 cells, Th17 cells, Tfh cells, and Treg cells; or gamma-delta T cells/gdT cells), hematopoietic stem cells (HSC), macrophages, natural killer cells (NK), B cells, dendritic cells (DC), or other immune cells.

[0153] In some embodiments, the cell can be from established cell lines, or they can be primary cells, where “primary cells,” refers to cells and cells cultures that have been derived from a subject and allowed to grow in vitro for a limited number of passages or splittings of the culture.

[0154] Sources of T Cells

[0155] Prior to expansion and genetic modification, the cells (e.g., T cells) can be obtained from a diseased or healthy subject. T cells can be obtained from a number of samples, including peripheral blood mononuclear cells, bone marrow, lymph node tissue, cord blood, thymus tissue, tissue from a site of infection, ascites, pleural effusion, spleen tissue, and tumors. In some embodiments, T cells can be obtained from a unit of blood collected from a subject using any number of techniques known to the skilled artisan, such as Ficoll™ separation. In one preferred embodiment, cells from the circulating blood of an individual are obtained by apheresis. The apheresis product typically contains lymphocytes, including T cells, monocytes, granulocytes, B cells, other nucleated white blood cells, red blood cells, and platelets. The cells collected by apheresis can be washed to remove the plasma fraction and to place the cells in an appropriate buffer or media for subsequent processing steps. In some embodiments, the cells are washed with phosphate buffered saline (PBS). The wash solution may lack calcium and/or magnesium or can lack many, if not all, divalent cations. After washing, the cells can be resuspended in a variety of biocompatible buffers, such as, for example, Ca2+-free, Mg2+-free PBS, PlasmaLyte A, or other saline solution with or without buffer. Alternatively, the undesirable components of the apheresis sample can be removed and the cells directly resuspended in culture media.

[0156] In some embodiments, T cells can be isolated from peripheral blood lymphocytes by lysing the red blood cells and depleting the monocytes, for example, by centrifugation through a PERCOLL™ gradient or by counterflow centrifugal elutriation. A specific subpopulation of T cells, such as CD3+, CD28+, CD4+, CD8+, CD45RA+, and CD45RO+ T cells, can be further isolated by positive or negative selection techniques. For example, in some embodiments, T cells can be isolated by incubation with anti-CD3/anti-CD28-conjugated beads, such as DYNABEADS® M-450 CD3/CD28 T, for a time period sufficient for positive selection of the desired T cells.

[0157] C. Pharmaceutical Compositions

[0158] Pharmaceutical compositions containing a genetically modified cell or a population of genetically modified cells with a pharmaceutically acceptable buffer, carrier, diluent or excipient are provided. The population of cells can be derived by expanding an isolated genetically modified cell (e.g., a CAR T cell derived using any described components and methods, such as the CLASH system). The cells can be modified to be bispecific or multispecific (e.g., by expressing a bispecific or multispecific CAR, by expressing two or more CARs, etc.). The cell can have been isolated from a diseased or healthy subject prior to genetic modification. Introduction of gene editing compositions (e.g., RNA-guided endonuclease and the one or more AAV vectors) to the cell can be performed ex vivo. In some embodiments, the pharmaceutical compositions contain cells including one or more CARs (e.g., anti-CD19 and/or anti-CD22 CAR) and/or one or more mutations in one or more desired genes, including but not limited to, TCR alpha, TCR beta, HLA genes, histocompatibility complex (MHC) genes, a gene listed in Table 2 or Table 3, TRAC, PRDM1, DPF3, SLAMF1, TET2, HFE, PELI1, PDCD1, HAVCR2/TIM3, TE72, NR4A2, LAIR1, and USB1.

[0159] “Pharmaceutically acceptable carrier” describes a pharmaceutically acceptable material, composition, or vehicle that is involved in carrying or transporting a compound of interest from one tissue, organ, or portion of the body to another tissue, organ, or portion of the body. For example, the carrier can be a liquid or solid filler, diluent, excipient, solvent, or encapsulating material, or a combination thereof. Each component of the carrier can be “pharmaceutically acceptable” in that it must be compatible with the other ingredients of the formulation. It must also be suitable for use in contact with any tissues or organs with which it may come in contact, meaning that it must not carry a risk of toxicity, irritation, allergic response, immunogenicity, or any other complication that excessively outweighs its therapeutic benefits.

[0160] The compositions can be conveniently formulated into pharmaceutical compositions composed of one or more of the cells in association with a pharmaceutically acceptable carrier. See, e.g., Remington's Pharmaceutical Sciences, latest edition, by E.W. Martin Mack Pub. Co., Easton, PA, which discloses typical carriers and conventional methods of preparing pharmaceutical compositions that can be used. These most typically would be standard carriers for administration of compositions to humans. Such pharmaceutical compositions can comprise buffers such as neutral buffered saline, phosphate buffered saline and the like; carbohydrates such as glucose, mannose, sucrose or dextrans, mannitol; proteins; polypeptides or amino acids such as glycine; antioxidants; chelating agents such as EDTA or glutathione; adjuvants (e.g., aluminum hydroxide); and preservatives.

[0161] The pharmaceutical compositions can be administered to the subject in a number of ways depending on whether local (e.g., limited to a particular region, physiological system, tissue, organ, or cell type) or systemic treatment is desired, and on the area to be treated. As such, the pharmaceutical compositions can be formulated for delivery via any route of administration. “Route of administration” can refer to any administration pathway known in the art, including but not limited to aerosol, nasal, oral, intravenous, intramuscular, intraperitoneal, inhalation, transmucosal, transdermal, parenteral, transfusion, implantation or transplantation, continuous infusion, topical application, and/or injections.

[0162] Parenteral administration, if used, is generally characterized by injection. Injectables can be prepared in conventional forms, either as liquid solutions or suspensions, solid forms suitable for solution or suspension in liquid prior to injection, or as emulsions. Suitable parenteral administration routes include intravascular administration (e.g., intravenous bolus injection, intravenous infusion, intra-arterial bolus injection, intra-arterial infusion and catheter instillation into the vasculature); peri- and intra-tissue injection (e.g., intraocular injection, intra-retinal injection, or sub-retinal injection); subcutaneous injection or deposition including subcutaneous infusion (such as by osmotic pumps); direct application by a catheter or other placement device (e.g., an implant).

[0163] Preparations for parenteral administration include sterile aqueous or non-aqueous solutions, suspensions, and emulsions which can also contain buffers, diluents and other suitable additives. Examples of non-aqueous solvents are propylene glycol, polyethylene glycol, vegetable oils such as olive oil, and injectable organic esters such as ethyl oleate. Aqueous carriers include water, alcoholic/aqueous solutions, emulsions or suspensions, including saline and buffered media. Parenteral vehicles include sodium chloride solution, Ringer's dextrose, dextrose and sodium chloride, lactated Ringer's, or fixed oils. Intravenous vehicles include fluid and nutrient replenishers, electrolyte replenishers (such as those based on Ringer's dextrose), and the like. Preservatives and other additives can also be present such as, for example, antimicrobials, anti-oxidants, chelating agents, and inert gases and the like.

[0164] In some embodiments, the composition is administered to a subject transarterially, subcutaneously, intradermally, intratumorally, intranodally, intramedullarly, intracystically intramuscularly, by intravenous injection, parenterally or intraperitoneally. The composition can be injected directly into a site of inflammation in the subject, a local disease site in the subject, a lymph node, an organ, a tumor, and the like. The pharmaceutical compositions are preferably formulated for intravenous administration. The quantity and frequency of administration will be determined by such factors as the condition of the patient, and the type and severity of the patient's disease, although appropriate dosages can be determined by clinical trials.

### III. Methods of CAR-T Generation

[0165] Provided are methods of making a cell or a population of cells (e.g., T cells) that express a chimeric antigen receptor (CAR). CARs are designed in a modular fashion that typically includes an extracellular target-binding domain, a hinge region, a transmembrane domain that anchors the CAR to the cell membrane, and one or more intracellular domains that transmit activation signals. Depending on the number of costimulatory domains, CARs can be classified into first (CD3z only), second (one costimulatory domain+CD3z), or third generation CARs (more than one costimulatory domain+CD3z). Introduction of CAR molecules into a T cell successfully redirects the T cell with additional antigen specificity and provides the necessary signals to drive full T cell activation. Because antigen recognition by CAR T cells is based on the binding of the target-binding single-chain variable fragment (scFv) to intact surface antigens, targeting of cells is not MHC restricted, co-receptor dependent, or dependent on processing and effective presentation of target epitopes.

[0166] Typically, CAR T cells are generated by modifying the genome of a recipient T cell to contain and express a CAR. The recipient T cell can be selected from memory T cells, effector T cells, central memory T cells, effector memory T cells, Th1 cells, Th2 cells, Th17 cells, and regulatory T cells. The genome can be edited by an RNA-guided endonuclease, such as Cpf1, that cleaves genomic DNA at a site the RNA-guided endonuclease is directed to by one or more guide RNAs. The vector containing the CAR can have homology arms that facilitate targeted integration of the CAR at the target site (e.g., at or near the site of DNA cleavage). The CAR can be regulated by or expressed under the control of an endogenous or exogenous promoter.

[0167] In particular embodiments, a method of making a CAR T cell involves contacting a T cell with an RNA-guided endonuclease and an AAV vector including (i) a crRNA expression cassette encoding a first guide RNA and optionally, a second guide RNA; (ii) a chimeric antigen receptor (CAR) expression cassette; and (iii) 5′ and 3′ homology-directed repair (HDR) arms for targeted genomic integration. The contacting is performed under conditions suitable for genomic editing of the T cell such that the CAR expression cassette is integrated into the genome and subsequently expressed. Suitable conditions can include, without limitation, cell culture and/or other conditions (e.g., media, pH, temperature, CO₂ content, etc.) that allow for the gene editing compositions to be introduced to the cells, expressed, and/or function as needed (e.g., the mRNA encoding the RNA guided endonuclease will be translated so that the endonuclease protein is expressed; the crRNA and/or CAR expression cassettes are integrated into the genome, transcribed and/or translated). In some embodiments, the first guide RNA targets the TRAC locus, the 5′ and 3′ HDR arms are homologous to the TRAC locus, the crRNA expression cassette and CAR expression cassette are integrated into the TRAC locus by HDR, and combinations thereof.

[0168] The results of the screens and other assays discussed herein can be used to guide development of other modified cells. For example, genes identified as a important can be knockout or knocked down or otherwise targeted using other means known in the art. Thus, also provided are cells having a heterologous nucleic acid construct encoding a chimeric antigen receptor (CAR) expression cassette and reduced or eliminated expression at one or more gene loci targeted by one or more guide RNAs selected from the group consisting of SEQ ID NOs:3-12,134. These cells need not express the guide RNA. The reduction of expression of the target gene can be modulated by, for example, by (i.e., permanent) genetic mutation or knockout, or by using an inhibitory nucleic acid including but not limited to antisense molecules, siRNA, miRNA, aptamers, ribozymes, triplex forming molecules, RNAi, and external guide sequences, which can be e.g., transiently transfected into cell, or expressed from an expression construct transfected into the cell or integrated into its genome. Such cells can be used in any of the methods, particularly the therapeutic methods, discussed herein.

[0169] The following provides exemplary materials and protocols that can be used to generate and characterize CAR T cells.

[0170] A. Materials

[0171] 1. Plasmids & DNA
[0172] (i) NSL-LbCpf1-NSL mRNA (TriLink BioTechnologies) Modified mRNA transcript with full substitution of pseudo-U and Capped (Cap 1) using CleanCap™ AG. mRNA can be polyadenylated with DNase and phosphatase treatment. mRNA can be purified by silica membrane and packaged as a solution in 1 mM Sodium Citrate, pH 6.4.
[0173] (ii) Plasmids: AAV6/AAV9, PDF6, AAV vector including pXD060, pXD017, pXD071, or derivatives for any of those vectors, with or without crRNAs chosen from the Rene library, Descartes library, or other crRNA.

[0174] 2. Cell Lines
[0175] (i) Human peripheral blood CD8+ and/or CD4+ T cells (STEMCELL Technologies, or other donors)
[0176] (ii) HEK293FT cells (ThermoFisher)
[0177] (iii) NALM6 cells (ATCC)

[0178] 3. Kits & Chemicals

### Antibodies and Staining Reagents:

[0179] APC anti-human TIGIT—Biolegend; Catalog Number: 372705
[0180] APC/Cyanine7 anti-human CD8a—Biolegend; Catalog Number: 300926
[0181] FITC anti-human CD197 (CCR7) Antibody—Biolegend; Catalog Number: 353216
[0182] FITC anti-human CD3 Antibody—Biolegend; Catalog Number: 300306
[0183] PE anti-human IgG Fc—Biolegend; Catalog Number: 409304
[0184] Brilliant Violet 510™ anti-human CD8—Biolegend; Catalog Number: 344732
[0185] Brilliant Violet 421™ anti-human CD62L—Biolegend; Catalog Number: 304828
[0186] PerCP/Cyanine5.5 anti-human/mouse Granzyme B—Biolegend; Catalog Number: 372212
[0187] Brilliant Violet 421™ anti-human CD366 (Tim-3)—Biolegend; Catalog Number: 345008
[0188] FITC anti-human TNF—Biolegend; Catalog Number: 502906
[0189] APC anti-human CD25—Biolegend; Catalog Number: 356109
[0190] PerCP/Cyanine5.5 anti-human CD27—Biolegend; Catalog Number: 393209
[0191] PE anti-DYKDDDDK (SEQ ID NO:12,246) Tag—Biolegend; Catalog Number: 637310
[0192] PE/Cy7 anti-human CD197 (CCR7) Antibody—Biolegend; Catalog Number: 353225
[0193] APC anti-human CD45RO—Biolegend; Catalog Number: 304210
[0194] APC anti-human IFN—Biolegend; Catalog Number: 506510
[0195] PerCP/Cyanine5.5 anti-human CD223 (LAG-3)—Biolegend; Catalog Number: 369312
[0196] APC anti-human CD127 (IL-7Ra) [Clone: A019D5]—Biolegend; Catalog Number: 351315
[0197] Brilliant Violet 421™ anti-human CD210 (IL-10 R)—Biolegend; Catalog Number: 308815
[0198] PerCP/Cyanine5.5 anti-human CD122 (IL-2Rβ)—Biolegend; Catalog Number: 339011
[0199] PE/Cyanine7 anti-human CD244 (2B4)—Biolegend; Catalog Number: 329519
[0200] APC/Cyanine7 anti-human CD294 (CRTH2)—Biolegend; Catalog Number: 350113
[0201] APC/Cyanine7 anti-human CD28—Biolegend; Catalog Number: 302965
[0202] FITC anti-human CD69 [Clone: FN50]— Biolegend; Catalog Number: 310903
[0203] Human Monoclonal BLIMP1/PRDM1 Antibody—R&D; Catalog Number: MAB36081
[0204] Blimp-1/PRDI-BF1 (C14A4) Rabbit mAb—CST; Catalog Number: 9115
[0205] Recombinant Human Siglec-2/CD22 Fc Chimera Protein—R&D; Catalog Number: 1968-SL-050
[0206] Pierce™ Recombinant Biotinylated Protein L—ThermoFisher; Catalog Number: 21189

### Bacterial and Virus Strains:

[0207] One Shot Stb13 Chemical Competent E. coli—ThermoFisher; Catalog Number: C737303
[0208] Endura™ ElectroCompetent Cells—Lucigen; Catalog Number: 60242-2
   qPCR Probes:

| | |
|---|---|
| ID2 | ThermoFisher Assay ID: Hs04187239_m1 |
| RASA3 | ThermoFisher Assay ID: Hs01071043_m1 |
| PCDH8 | ThermoFisher Assay ID: Hs00159910_ml |
| IFIT3 | ThermoFisher Assay ID: Hs01922752_s1 |
| TNFSF4 | ThermoFisher Assay ID: Hs00967195_m1 |
| RIN3 | ThermoFisher Assay ID: Hs01112081_m1 |
| PTPN14 | ThermoFisher Assay ID: Hs00193643_m1 |
| CDCA7 | ThermoFisher Assay ID: Hs00230589_m1 |
| RUNX3 | ThermoFisher Assay ID: Hs00231709_m1 |
| FOXO1 | ThermoFisher Assay ID: Hs01054576_m1 |
| TBX21 | ThermoFisher Assay ID: Hs00203436_m1 |
| BATF | ThermoFisher Assay ID: Hs00232390_m1 |
| CXCR6 | ThermoFisher Assay ID: Hs00174843_m1 |
| PRF1 | ThermoFisher Assay ID: Hs00169473_m1 |
| STAT6 | ThermoFisher Assay ID: Hs00598625_m1 |
| STAT1 | ThermoFisher Assay ID: Hs01013996_m1 |
| SOCS1 | ThermoFisher Assay ID: Hs00705164_s1 |
| IL13 | ThermoFisher Assay ID: Hs00174379_m1 |
| WNT11 | ThermoFisher Assay ID: Hs00182986_m1 |
| KLF2 | ThermoFisher Assay ID: Hs00360439_g1 |
| S1PR1 | ThermoFisher Assay ID: Hs00173499_m1 |
| IRF4 | ThermoFisher Assay ID: Hs01056534_m1 |
| NFKB1 | ThermoFisher Assay ID: Hs00765730_m1 |
| GAPDH | ThermoFisher Assay ID: Hs02786624_g1 |
| PRDM1_ISO1 | ThermoFisher Assay ID: APU6667 |
| PRDM1_ISO2 | ThermoFisher Assay ID: APRWH2D |
| PRDM1_ISO3 | ThermoFisher Assay ID: APT2DMA |

### Chemicals, Peptides, and Recombinant Proteins:

[0209] DPBS, no calcium, no magnesium—Gibco; Catalog Number: 14190250
[0210] RPMI 1640 Medium—Gibco; Catalog Number: 11875-093
[0211] DMEM, high glucose, pyruvate—Gibco; Catalog Number: 11995065
[0212] Fetal Bovine Serum—Sigma Aldrich; Catalog Number: F4135-500ML
[0213] Penicillin-Streptomycin (10,000 U/mL)—Gibco; Catalog Number: 15140122
[0214] 2-Mercaptoethanol—Sigma Aldrich; Catalog Number: M6250-10ML
[0215] X-VIVO 15 Serum-free Hematopoietic Cell Medium—Lonza; Catalog Number: BE02-060F
[0216] Corning; Human AB Serum; Male Donors; type AB; US; 100 mL, 35-060-CI 1/EA—Corning; Catalog Number: MT35060CI
[0217] ACK Lysing Buffer—Lonza; Catalog Number: 10-548E
[0218] PEI MAX—Polyscience; Catalog Number: 24765-1
[0219] PEG8000—Promega; Catalog Number: V3011
[0220] RIPA buffer—Boston BioProducts; Catalog Number: BP-115
[0221] protease inhibitor coctail—ThermoFisher, Catalog Number: 78437
[0222] Pierce™ BCA Protein Assay Kit—ThermoFisher, Catalog Number: 23227
[0223] LS Columns—Miltenyi; Catalog Number: 130-042-401
[0224] Human CD8 T Cell Isolation Kit—Miltenyi; Catalog Number: 130-096-495
[0225] streptavidin microbeads—Miltenyi; Catalog Number: 130-048-102
[0226] FcR Blocking Reagent, Human—Miltenyi; Catalog Number: 130-059-901
[0227] Pierce™ NHS-Activated Agarose Slurry—ThermoFisher; Catalog Number: 26200
[0228] Recombinant Human IL-2 (carrier-free)—Biolegend; Catalog Number: 589104
[0229] BD Cytofix/Cytoperm™ Fixation/Permeabilization Solution Kit—BD; Catalog Number: 554714
[0230] QuickExtract DNA Extraction Solution—Epicenter; Catalog Number: QE09050
[0231] QIAamp DNA Blood Mini Kit—Qiagen; Catalog Number: 51106
[0232] T7 Endonuclease I—NEB; Catalog Number: M0302L
[0233] Proteinase K—Qiagen; Catalog Number: 19131
[0234] RNAse A—Qiagen; Catalog Number: 19101
[0235] Gibson Assembly® Master Mix—NEB; Catalog Number: E2611
[0236] Phusion Flash High-Fidelity PCR Master Mix—ThermoFisher, Catalog Number: F548L
[0237] DreamTaq Green PCR Master Mix (2×)—ThermoFisher, Catalog Number: K1082
[0238] QIAquick Gel Extraction Kit QiagenCatalog Number: 28706
[0239] E-Gel™ Low Range Quantitative DNA Ladder—ThermoFisher, Catalog Number: 12373031
[0240] NEBNext® Ultra™ RNA Library Prep Kit—NEB; Catalog Number: E7530S
[0241] NEBNext® Multiplex Oligos for illumina—NEB; Catalog Number: E7335S
[0242] Nextera DNA Library Prep Kit—Illumina; Catalog Number: FC-121-1030
[0243] Nextera Index Kit—Illumina; Catalog Number: FC-121-1011
[0244] TRIzol™ Reagent—Invitrogen; Catalog Number: 15596026
[0245] RNeasy Plus mini isolation kit—Qiagen; Catalog Number: 74134
[0246] M-MLV reverse transcriptase enzyme—Sigma Aldrich; Catalog Number: M1302-40KU
[0247] Oligo(dT)20 Primer—ThermoFisher, Catalog Number: 18418020
[0248] TaqMan® Fast Universal PCR Master Mix—Invitrogen; Catalog Number: 4352042
[0249] BpiI (BbsI) (10 U/μL)—ThermoFisher; Catalog Number: ER1012
[0250] Benzonase® Nuclease—ThermoFisher, Catalog Number: E1014-25KU
[0251] 4-20% Mini-PROTEAN® TGX™ Precast Protein Gels, 10-well—BioRad; Catalog Number: 4561094
[0252] Bovine Serum Albumin—Sigma Aldrich; Catalog Number: A9418-100G
[0253] Pierce™ ECL Western Blotting Substrate—ThermoFisher, Catalog Number: 32106
[0254] EDTA—Sigma Aldrich; Catalog Number: E8008-100ML
[0255] XenoLight D-Luciferin—K+Salt Bioluminescent Substrate—Perkin Elmer; Catalog Number: 122799
[0256] Neon™ Transfection System 100 μL Kit—Invitrogen; Catalog Number: MPK10025.

[0257] B. Equipment
[0258] (i) PCR Thermocycler
[0259] (ii) Tissue culture hood
[0260] (iii) 15-cm tissue culture dishes (Corning)
[0261] (iv) Retronectin-coated plates (Takara)
[0262] (v) Neon® Transfection System (ThermoFisher)
[0263] (vi) Bioanalyzer (Agilent)
[0264] (vii) Pipettes and tips
[0265] (viii) Next generation sequencing machines (Illumina)
[0266] (ix) Cell culture incubators (37° C., 5% CO₂)
[0267] (x) Countess automated cell counter (Thermo Fisher)
[0268] (xi) Plate reader (PerkinElmer)
[0269] (xii) BD FACSAria II (BD Biosciences)
[0270] (xiii) FlowJo software 9.9.4 (Treestar, Ashland, OR)

[0271] C. Construction of AAV Vectors

[0272] 1. crRNA Expression Vector Design and Construction
[0273] (i) Identify genes for knockout by targeted delivery of HDR template. TRAC is used as an example, but any gene with a Cpf1 PAM sequence can be targeted.
[0274] (ii) Design LbCpf1 crRNA (20 bp) with Benchling or other computational pipelines. crTRAC: GAGTCTCTCAGCTGGTACAC (SEQ ID NO:12,135)
[0275] (iii) Synthesize oligonucleotides with two LbCpf1 direct repeats and sticky ends.
[0276] (iv) Digest pXD060, pXD017, or pXD071 with FD BbsI and insert guide after U6 promoter.

[0277] 2. CAR Sequence Generation
[0278] (i) Generation of CD22BBz CAR can be performed as previously described (Haso, W., et al., Blood., 121(7):1165-74 (2013). CD22 binding scFV (m971) specific for the human CD22 followed by CD8 hinge-transmembrane-regions linked to 4-1BB (CD137) intracellular domains and CD3ζ intracellular domain.
[0279] (ii) The sequence of CD19 binding scFv (FMC63) can be found from NCBI (GenBank: HM852952) and can be followed by CD8 hinge-transmembrane-regions linked to 4-1BB (CD137) intracellular domains and CD3ζ intracellular domain (Kochenderfer, J N., et al., J. Immunother., 32(7):689-702 (2009)). In order to detect CD19BBz CAR in different way, the Flag or other tag sequence can be added after the CD8a leader sequence.
[0280] (iii) Synthesize m971-BBz and FMC63-BBz using gBlock (IDT).

[0281] 3. HDR Template Design
[0282] (i) Amplify left and right homologous arms of the TRAC locus from primary CD4+ T cells by PCR using locus-specific primer sets with multiple cloning site (MCS). PCR annealing temperature (60° C.).
[0283] (ii) Sequence amplicons

[0284] 4. AAV-crRNA-HDR-CAR Vector Cloning
[0285] (i) Clone HDR sequences into the AAV vector (pXD060) by Gibson assembly. Incubate samples in a thermocycler at 50° C. for 30 minutes.
[0286] (ii) pXD071 (CD19CAR) construction: Digest pXD040 and then clone CAR sequences into MCS by Gibson assembly.

[0287] D. AAV Production and Titration

[0288] 1. AAV Production
[0289] (i) Transfect HEK293FT cells with AAV constructs in 15-cm tissue culture dishes, AAV2 transgene vectors, packaging (pDF6) plasmid, and AAV6/9 serotype plasmid together with polyethyleneimine (PEI).
[0290] (ii) Collect transfected cells with PBS after 72 hours of transfection.

[0291] 2. AAV Purification and Titration
[0292] (i) Mix transfected cells with pure chloroform ( 1/10 volume).
[0293] (ii) Incubate cells at 37° C. with vigorous shaking for 1 hour.
[0294] (iii) Add NaCl to a final concentration of 1 M.
[0295] (iv) Centrifuge at 20,000 g at 4° C. for 15 minutes.
[0296] (v) Transfer aqueous layer to another tube and discard the chloroform layer.
[0297] (vi) Add PEG8000 to the sample until 10% (w/v) and shake until dissolved.
[0298] (vii) Incubate the mixture at 4° C. for 1 hour and then centrifuge at 20,000 g at 4° C.
[0299] (viii) Discard supernatant and suspend the pellet in DPBS with MgCl₂.
[0300] (ix) Treat the sample with universal nuclease and incubate at 37° C. for 30 minutes.
[0301] (x) Add chloroform (1:1 volume), shake and centrifuge at 12,000 g at 4° C. for 15 minutes.
[0302] (xi) Isolate the aqueous layer and concentrate through a 100-kDa MWCO. Concentrate AAV at high concentration so the volume can be reduced when performing the infection, which can decrease the toxicity of AAV. AAV should be aliquoted and stored at −80° C.
[0303] (xii) Titer virus by qPCR using custom Taqman assays (ThermoFisher) targeted to promoter U6.

[0304] E. T Cell Electroporation

[0305] Human primary peripheral blood CD4+ T cells can be acquired from healthy donors (STEMCELL technologies). T cells can be cultured in X-VIVO media (Lonza) with 5% human AB serum and recombinant human IL-2 30 U/mL.
[0306] (i) Activate T cells with CD3/CD28 Dynabeads for 2 days prior to electroporation.
[0307] (ii) Use magnetic holder to remove Dynabeads.
[0308] (iii) Prepare cells at a density of 2×10⁵ cells per 10 μL tip reaction or 2×10⁶ cells per 100 μL tip reaction in electroporation Buffer R (Neon Transfection System Kits).
[0309] (iv) Mix with 1 μg or 10 μg of modified NLS-LbCpf1-NLS mRNA (TriLink) according to reaction volume.
[0310] (v) Electric shock at program 24 (1,600V, 10 ms and three pulses).
[0311] (vi) Transfer cells into 200 μl or 1 mL of pre-warmed X-VIVO media (without antibiotics) immediately after electroporation.
[0312] (vii) Add indicated volumes of AAV (AAV volume to not exceed 20% of culture volume) into the T cells 2-4 hours after electroporation. The CAR(s) will begin to be expressed after two to three days and have enrichment after stimulation with target cells.

[0313] F. CAR-T Detection by Flow Cytometry
[0314] (i) After electroporation for 5 days, incubate 1×10⁶ CD22BBz CAR transduced T cells with 0.2 μg CD22-Fc (R&D system) in 100 μL PBS for 30 minutes, and then stain with PE-IgG-Fc and FITC-CD3 antibodies for 30 minutes.
[0315] (ii) For CD19CAR detection, incubate CD19BBz CAR transduced T cells with APC-anti-Flag and FITC-CD3 antibodies for 30 minutes.
[0316] (iii) Wash cells twice and quantify and sort labeled cells on BD FACSAria II.
[0317] (iv) The staining patterns can be analyzed using FlowJo software 9.9.4 (Treestar, Ashland, OR).

[0318] G. T7E1 Assay

[0319] Five days after electroporation, harvest the bulk transduced T cells and sorted T cells. The genomic DNA can be collected using the QuickExtract DNA Extraction Solution (Epicentre).
[0320] (i) PCR amplify target loci from genomic DNA around cut site.
[0321] (ii) Run PCR amplicons on 2% E-gel EX and purify (with known band size) using QIAquick Gel Extraction Kit.
[0322] (iii) After purification, denature 200 ng of purified PCR product, anneal, and digest with T7E1, 37° C. 45 minutes (New England BioLabs).
[0323] (iv) Load digested PCR products into 2% E-gel EX and quantify DNA fragment abundance using E-Gel™ Low Range Quantitative DNA Ladder (ThermoFisher).

[0324] H. HDR Quantification and NGS Sequencing Analysis

[0325] 1. Semi-Quantitative In-Out PCR
[0326] (i) Use three primers for In-Out PCR:
   [0327] TRAC 1st: binds to a sequence of the left TRAC homology arm
   [0328] TRAC 2nd: binds to genomic sequence outside of this AAV donor
   [0329] CD22CAR 3rd primer: recognizes a sequence contained in the m971-BBz cassette
[0330] (ii) Normalize amplicon (labeled TRAC-HDR) concentration by comparison to the product resulting from the uninfected control with genomic DNA isolated from human CD4+ T cells.
[0331] (iii) PCR products can be used for Nextera library preparation following the manufacturer's protocols (e.g., Illumina).
[0332] (iv) Prepped libraries can be sequenced on 100-bp single-end reads on an Illumina HiSeq 4000 instrument or equivalent.

[0333] 2. Indel Quantification
[0334] (i) Some PCR products from amplification around cut site of genomic DNA (same samples as T7E1 assay) can be used for Nextera library preparation following the manufacturer's protocols (Illumina).
[0335] (ii) Prepped libraries can be sequenced on 100-bp paired-end reads on an Illumina HiSeq 4000 instrument or equivalent (generating 29 to 74 million reads per library).
[0336] (iii) Map paired reads to amplicon sequences (expected sequences provided in FASTA form to generate indices) using BWA-MEM with the −M option.
[0337] (iv) Discard 100 bp reads in SAM file that fall outside a +/−75 bp window of expected cut site within the amplicon.
[0338] (v) Discard soft-clipped reads (identified with “S” character in CIGAR string).
[0339] (vi) Identify indel reads by the presence of “I” or “D” characters within the CIGAR string.
[0340] (vii) Quantify cutting efficiency as percentage of indels over total (indel plus wild-type reads) within the defined window.

[0341] I. Co-culture Functional Assays

[0342] 1. Stable Cell Line Generation
[0343] (i) Generate lentivirus including GFP-Luciferase reporter genes.
[0344] (ii) Infect NALM6 cells (ATCC) with 2× concentrated lentivirus by spinoculation in retronectin-coated (Takara) plates at 800 g for 45 minutes at 32° C.
[0345] (iii) After infection for 2 days, sort GFP positive cells (NALM6-GL) by flow cytometry.
[0346] (iv) Perform a second round of sorting after culturing for an additional two days.
[0347] (v) Incubate cells with 150 μg/ml D-Luciferin (PerkinElmer) and measure bioluminescence signal intensity by an IVIS system to assess luciferase expression.

[0348] 2. Cancer Cell Cytolytic Assay (Kill Assay)
[0349] (i) Seed 2×10⁴ NALM6-GL cells in a 96 well plate.
[0350] (ii) Co-culture modified T cells with NALM6-GL at indicated E:T ratios for 24 hours.
[0351] (iii) Add 150 μg/ml D-Luciferin (PerkinElmer) into each well and measure luciferase assay intensity by a plate reader (PerkinElmer) to assess cell proliferation.

[0352] 3. T Cell Exhaustion Assay
[0353] (i) Co-culture CAR T cells with NALM6-GL cells at appropriate E:T ratio (e.g., 0.2:1) for appropriate time period (e.g., 24 hours).
[0354] (ii) Collect cells and wash once by DPBS. Incubate cells with 0.2 μg CD22-Fc (R&D Systems) in 100 μL DPBS for 30 minutes.
[0355] (iii) Stain cells with PE-IgG-Fc, PD-1-FITC, TIGIT-APC and LAG3-Percp/cy5.5 (Biolegend) for 30 minutes.
[0356] (iv) Measure stained cells by flow cytometry.

[0357] 4. Intracellular staining of IFNγ and TNF-α
[0358] (i) After infection for 5 days, co-culture AAV transduced CD22BBz CAR-T cells with NALM6 at 1:1 E:T ratio in fresh media supplemented with brefeldin A and 2 ng/mL IL-2.
[0359] (ii) After 5 hours of incubation, collect and stain for surface CAR.
[0360] (iii) Fix and permeabilize cells by fixation/permeabilization solution (BD) and add anti-IFNγ-APC or anti-TNF-α-FITC for intracellular staining.
[0361] (iv) After 30 minutes, wash stained cells by BD Perm/Wash™ buffer and measure cells by flow cytometry.

### IV. Methods of Use

[0362] A. Screens

[0363] Methods of performing screens are provided. Typically, the screens are designed to identify genes involved in one or more phenotypes of interest. Exemplary cellular phenotypes include increased tumor/tumor microenvironment infiltration, increased target cell affinity, increased target cell cytotoxicity, increased persistence, increased expansion/proliferation, reduced exhaustion, increased anti-cancer metabolic function, increased ability to prevent immune escape, reduced unspecific cytokine production, reduced off-target toxicity, reduced cytokine release syndrome (CRS) (e.g., when introduced in vivo), and combinations thereof. The screens can be loss of function or gain of function. The screens can be performed in vitro (e.g., in cultured cells) or in vivo (e.g., in a subject such as a mouse or rat).

[0364] Typically, the screen involves contacting cells with a library of vectors containing guide RNAs and/or CARs and an RNA-guided endonuclease (e.g., Cpf1). The screen is performed under conditions that permit the cells to undergo genetic modification (e.g., knock-in and subsequent expression of a CAR and/or alteration of a target gene or target site). The screen method can further include applying selective pressure to the cells in order to enrich for cells that exhibit a desired phenotype. In some embodiments, the method can include identifying guide RNAs that are enriched or highly represented (e.g., compared to control guide RNAs) in the cells that have been selected. In some embodiments, the method includes identifying guide RNAs that are depleted or under-represented (e.g., compared to control guide RNAs) in the cells that have been selected. The enrichment or depletion of guide RNAs can be relative to a time point before selection (e.g., day 0), non-targeting guide RNAs, or combinations thereof. Since the gene targeted by each guide RNA is known, identification of the guide RNAs allows for identification of the genes contributing to the phenotype of interest. Results of the screen can be validated by independently generating cells containing one or more modifications (e.g., mutations) in the one or more genes identified by the screen. The same or different guide RNAs may be used for validation.

[0365] An exemplary screen for identifying one or more genes that enhance a desired phenotype of a cell containing a CAR includes (a) contacting a population of cells with an RNA-guided endonuclease and a library containing a plurality of vectors, wherein each vector independently contains (i) a crRNA expression cassette encoding a first guide RNA and a second guide RNA; (ii) a CAR expression cassette; and (iii) 5′ and 3′ homology arms for targeted genomic integration via homology directed repair (HDR); and (b) selecting for cells exhibiting the desired phenotype. In some preferred embodiments, each AAV vector in the plurality of AAV vectors contains a unique second guide RNA. The contacting is performed under conditions that allow targeted genomic integration of the crRNA and CAR expression cassettes and expression of the guide RNAs and CAR encoded therein. In some embodiments, the first guide RNA targets the TRAC locus; the second guide RNA targets a gene involved in T cell exhaustion, T cell proliferation, T cell co-stimulation, memory T cell differentiation, T cell receptor signaling, epigenetic regulation, adaptive immune response, immune response to tumor cells, and/or other immune functions; or a combination thereof. In some embodiments, the first guide RNA targets the TRAC locus and/or the second guide RNAs within the population of cell collectively target any gene in the genome, such as one or more genes selected from Table 2 or Table 3.

[0366] The method can further include identifying the crRNA expression cassette present in the cells that have been selected such that the genes that enhance the desired phenotype are identified based on their targeting by the guide RNAs encoded by the crRNA expression cassette. In some embodiments, identification of the crRNA expression cassette can be achieved by sequencing genomic DNA.

[0367] B. Methods of Treatment

[0368] Methods of inducing or increasing an immune response in a subject by administering to the subject an effective amount of a pharmaceutical composition containing a population of genetically modified cells (e.g., CAR T cells) are provided.

[0369] The agents and compositions can also be used in methods of treating a disease, disorder, or condition. An exemplary method involves treating a subject (e.g., a human) having a disease, disorder, or condition by administering to the subject an effective amount of a pharmaceutical composition containing a population of genetically modified cells (e.g., CAR T cells). In some embodiments, the disease, disorder, or condition is associated with an elevated expression or specific expression of an antigen. In some embodiments, the cells administered to the subject contain/express a CAR that targets the antigen.

[0370] In some embodiments, the cell(s) are isolated from the subject having the disease, disorder, or condition, or from a healthy donor, prior to genetic modification. For example, in some embodiments, the method of treatment involves (i) obtaining cells from a subject (e.g., T cells), (ii) modifying the cells to express a heterologous CAR, and (iii) administering an effective amount of the modified cells to the subject. In some embodiments, the CAR recognizes an antigen associated with the disease, disorder, or condition. Any of the methods of treatment can further include expanding the population of cells before and/or after undergoing genetic modification.

[0371] In some embodiments, besides integration and expression of a CAR, the cell is further modified by one or more mutations causing reduced function or loss of function of one or more genes (or gene products thereof) selected from PRDM1, DPF3, SLAMF1, TET2, HFE, PELI1, PDCD1, HAVCR2/TIM3, TET2, NR4A2, LAIR1, USB1, and genes listed in Table 2 or Table 3.

[0372] Diseases to be Treated

[0373] The subject administered the compositions can have a disease, disorder, or condition such, as but not limited to, cancer, an inflammatory disease, a neuronal disorder, HIV/AIDS, diabetes, a cardiovascular disease, an infectious disease, an immune system disorder such autoimmune disease, or combinations thereof.

[0374] 1. Cancers

[0375] Cancer is a disease of genetic instability, allowing a cancer cell to acquire the hallmarks proposed by Hanahan and Weinberg, including (i) self-sufficiency in growth signals; (ii) insensitivity to anti-growth signals; (iii) evading apoptosis; (iv) sustained angiogenesis; (v) tissue invasion and metastasis; (vi) limitless replicative potential; (vii) reprogramming of energy metabolism; and (viii) evading immune destruction (Cell., 144:646-674, (2011)).

[0376] Tumors which can be treated in accordance with the methods are classified according to the embryonic origin of the tissue from which the tumor is derived. Carcinomas are tumors arising from endodermal or ectodermal tissues such as skin or the epithelial lining of internal organs and glands. Sarcomas, which arise less frequently, are derived from mesodermal connective tissues such as bone, fat, and cartilage. The leukemias and lymphomas are malignant tumors of hematopoietic cells of the bone marrow. Leukemias proliferate as single cells, whereas lymphomas tend to grow as tumor masses. Malignant tumors may show up at numerous organs or tissues of the body to establish a cancer.

[0377] The compositions and methods are generally suited for treatment of carcinomas, sarcomas, lymphomas and leukemias. The described compositions and methods are useful for treating, or alleviating subjects having benign or malignant tumors by delaying or inhibiting the growth/proliferation or viability of tumor cells in a subject, reducing the number, growth or size of tumors, inhibiting or reducing metastasis of the tumor, and/or inhibiting or reducing symptoms associated with tumor development or growth.

[0378] In some embodiments, the cancer is a liquid cancer (e.g., acute myeloid leukemia (AML), chronic lymphocytic leukemia (CLL), mantle cell lymphoma (MCL), multiple myeloma (MM), acute lymphoid leukemia (ALL), Hodgkin lymphoma, B-cell acute lymphoid leukemia (BALL), T-cell acute lymphoid leukemia (TALL), small lymphocytic leukemia (SLL), B cell prolymphocytic leukemia, blastic plasmacytoid dendritic cell neoplasm, Burkitt's lymphoma, diffuse large B cell lymphoma (DLBCL), chronic myeloid leukemia, myeloproliferative neoplasms, follicular lymphoma, myelodysplasia, myelodysplastic syndrome, non-Hodgkin lymphoma, plasmablastic lymphoma, plasmacytoid dendritic cell neoplasm, and Waldenstrom macroglobulinemia).

[0379] In some embodiments, the cancer is a solid cancer. The term “solid cancer” refers to an abnormal mass of tissue that usually does not contain cysts or liquid areas. Solid cancers may be benign or malignant. Different types of solid cancers are named for the type of cells that form them. Examples of solid cancers include but are not limited to, mesothelioma, non-small cell lung cancer, small cell lung cancer, squamous cell lung cancer, large cell lung cancer, pancreatic cancer, pancreatic ductal adenocarcinoma, esophageal adenocarcinoma, breast cancer, glioblastoma, ovarian cancer, colorectal cancer, prostate cancer, cervical cancer, skin cancer, melanoma, renal cancer, liver cancer, brain cancer, thymoma, sarcoma, carcinoma, uterine cancer, kidney cancer, gastrointestinal cancer, urothelial cancer, pharynx cancer, head and neck cancer, rectal cancer, esophagus cancer, or bladder cancer, or a metastasis thereof.

TABLE 1
Provides a non-limiting list of cancers for which the CAR of the methods
and compositions can target a specific or an associated antigen.

| | | | | |
|---|---|---|---|---|
| Acute Lymphoblastic | Acute Myeloid Leukemia | Adrenocortical | AIDS-Related Cancers | Kaposi Sarcoma |
| Leukemia (ALL) | (AML) | Carcinoma | | |
| AIDS-Related | Primary CNS Lymphoma | Anal Cancer | Appendix Cancer | Astrocytomas |
| Lymphoma | | | (Gastrointestinal | |
| | | | Carcinoid Tumors) | |
| Atypical Teratoid/ | Brain Cancer | Basal Cell Carcinoma | Bile Duct Cancer | Bladder Cancer |
| Rhabdoid Tumor | | of the Skin | | |
| Bone Cancer (includes | Brain Tumors | Breast Cancer | Bronchial Tumors | Burkitt Lymphoma |
| Ewing Sarcoma and | | | | |
| Osteosarcoma and | | | | |
| Malignant Fibrous | | | | |
| Histiocytoma) | | | | |
| Non-Hodgkin | Carcinoid Tumors | Carcinoma of | Cardiac (Heart) Tumors | Embryonal Tumors |
| Lymphoma | | Unknown Primary | | |
| Germ Cell Tumor | Primary CNS Lymphoma | Cervical Cancer | Cholangio-carcinoma | Chordoma |
| Chronic Lymphocytic | Chronic Myelogenous | Chronic | Colorectal Cancer | Cranio-pharyngioma |
| Leukemia (CLL) | Leukemia (CML) | Myeloproliferative | | |
| | | Neoplasms | | |
| Cutaneous T-Cell | Ductal Carcinoma In Situ | Endometrial Cancer | Ependymoma | Esophageal Cancer |
| Lymphoma (Mycosis | (DCIS) | | | |
| Fungoides and Sézary | | | | |
| Syndrome) | | | | |
| Esthesioneuro-blastoma | Ewing Sarcoma | Extracranial Germ Cell | Eye Cancer | Intraocular |
| | | Tumor | | Melanoma |
| Fallopian Tube Cancer | Fibrous Histiocytoma of | Osteosarcoma | Gallbladder Cancer | Gastric Cancer |
| | Bone | | | |
| Stomach Cancer | Gastrointestinal Carcinoid | Gastrointestinal | Central Nervous | Extracranial Germ |
| | Tumor | Stromal Tumors | System Germ Cell | Cell Tumors |
| | | (GIST) | Tumors | |
| Extragonadal Germ Cell | Ovarian Germ Cell | Testicular Cancer | Gestational | Hairy Cell Leukemia |
| Tumors | Tumors | | Trophoblastic Disease | |
| Head and Neck Cancer | Heart Tumors | Hepatocellular (Liver) | Histiocytosis | Hodgkin Lymphoma |
| | | Cancer | (Langerhans Cell) | |
| Hypopharyngeal Cancer | Intraocular Melanoma | Islet Cell Tumors | Pancreatic | Kidney Cancer |
| | | | Neuroendocrine | |
| | | | Tumors | |
| Renal Cell Cancer | Langerhans Cell | Laryngeal Cancer | Leukemia | Lip and Oral Cavity |
| | Histiocytosis | | | Cancer |
| Liver Cancer | Lung Cancer (Non-Small | Lymphoma | Male Breast Cancer | Malignant Fibrous |
| | Cell and Small Cell) | | | Histiocytoma of |
| | | | | Bone and |
| | | | | Osteosarcoma |
| Melanoma | Intraocular (Eye) | Merkel Cell Carcinoma | Malignant | Metastatic Cancer |
| | Melanoma | (Skin Cancer) | Mesothelioma | |
| Metastatic Squamous | Midline Tract Carcinoma | Mouth Cancer | Multiple Endocrine | Multiple |
| Neck Cancer with | With NUT Gene Changes | | Neoplasia Syndromes | Myeloma/Plasma |
| Occult Primary | | | | Cell Neoplasms |
| Mycosis Fungoides | Myelodysplastic | Myelodysplastic/ | Nasal Cavity and | Nasopharyngeal |
| (Lymphoma) | Syndromes | Myeloproliferative | Paranasal Sinus Cancer | Cancer |
| | | Neoplasms | | |
| Neuroblastoma | Non-Small Cell Lung | Oral Cancer | and Oropharyngeal | Ovarian Cancer |
| | Cancer | | Cancer | |
| Pancreatic Cancer | Papillomatosis | Paraganglioma | Paranasal Sinus and | Parathyroid Cancer |
| | | | Nasal Cavity Cancer | |
| Penile Cancer | Pharyngeal Cancer | Pheochromocytoma | Pituitary Tumor | Plasma Cell |
| | | | | Neoplasm/Multiple |
| | | | | Myeloma |
| Pleuropulmonary | Primary Central Nervous | Primary Peritoneal | Prostate Cancer | Rectal Cancer |
| Blastoma | System (CNS) Lymphoma | Cancer | | |
| Recurrent Cancer | Retinoblastoma | Rhabdomyosarcoma | Salivary Gland Cancer | Sarcoma |
| Vascular Tumors | Uterine Sarcoma | Sézary Syndrome | Small Cell Lung Cancer | Small Intestine |
| | | (Lymphoma) | | Cancer |
| Soft Tissue Sarcoma | Squamous Cell Carcinoma | Stomach (Gastric) | Throat Cancer | Thymoma |
| | | Cancer | | |
| Thymic Carcinoma | Thyroid Cancer | Transitional Cell | Carcinoma of Unknown | Ureter and Renal |
| | | Cancer of the Renal | Primary | Pelvis |
| | | Pelvis and Ureter | | |
| Transitional Cell Cancer | Urethral Cancer | Uterine Cancer | Vaginal Cancer | Vulvar Cancer |
| Wilms Tumor | | | | |

[0380] The types of cancer that can be treated with the provided compositions and methods include, but are not limited to, cancers such as vascular cancer such as multiple myeloma, adenocarcinomas and sarcomas, of bone, bladder, brain, breast, cervical, colorectal, esophageal, kidney, liver, lung, nasopharangeal, pancreatic, prostate, skin, stomach, and uterine. In some embodiments, the compositions are used to treat multiple cancer types concurrently. The compositions can also be used to treat metastases or tumors at multiple locations.

[0381] 2. Immune System Disorders

[0382] Immune system disorders can also be treated. Non-limiting examples of immune system disorders include 22q11.2 deletion syndrome, Achondroplasia and severe combined immunodeficiency, Adenosine Deaminase 2 deficiency, Adenosine deaminase deficiency, Adult-onset immunodeficiency with anti-interferon-gamma autoantibodies, Agammaglobulinemia, non-Bruton type, Aicardi-Goutieres syndrome, Aicardi-Goutieres syndrome type 5, Allergic bronchopulmonary aspergillosis, Alopecia, Alopecia totalis, Alopecia universalis, Amyloidosis AA, Amyloidosis familial visceral, Ataxia telangiectasia, Autoimmune lymphoproliferative syndrome, Autoimmune lymphoproliferative syndrome due to CTLA4 haploinsuffiency, Autoimmune polyglandular syndrome type 1, Autosomal dominant hyper IgE syndrome, Autosomal recessive early-onset inflammatory bowel disease, Autosomal recessive hyper IgE syndrome, Bare lymphocyte syndrome 2, Barth syndrome, Blau syndrome, Bloom syndrome, Bronchiolitis obliterans, C1q deficiency, Candidiasis familial chronic mucocutaneous, autosomal recessive, Cartilage-hair hypoplasia, CHARGE syndrome, Chediak-Higashi syndrome, Cherubism, Chronic atypical neutrophilic dermatosis with lipodystrophy and elevated temperature, Chronic graft versus host disease, Chronic granulomatous disease, Chronic Infantile Neurological Cutaneous Articular syndrome, Chronic mucocutaneous candidiasis (CMC), Cohen syndrome, Combined immunodeficiency with skin granulomas, Common variable immunodeficiency, Complement component 2 deficiency, Complement component 8 deficiency type 1, Complement component 8 deficiency type 2, Congenital pulmonary alveolar proteinosis, Cryoglobulinemia, Cutaneous mastocytoma, Cyclic neutropenia, Deficiency of interleukin-1 receptor antagonist, Dendritic cell, monocyte, B lymphocyte, and natural killer lymphocyte deficiency, Dyskeratosis congenital, Dyskeratosis congenita autosomal dominant, Dyskeratosis congenita autosomal recessive, Dyskeratosis congenita X-linked, Epidermodysplasia verruciformis, Familial amyloidosis, Finnish type, Familial cold autoinflammatory syndrome, Familial Mediterranean fever, Familial mixed cryoglobulinemia, Felty's syndrome, Glycogen storage disease type 1B, Griscelli syndrome type 2, Hashimoto encephalopathy, Hashimoto's syndrome, Hemophagocytic lymphohistiocytosis, Hennekam syndrome, Hepatic venoocclusive disease with immunodeficiency, Hereditary folate malabsorption, Hermansky Pudlak syndrome 2, Herpes simplex encephalitis, Hoyeraal Hreidarsson syndrome, Hyper IgE syndrome, Hyper-IgD syndrome, ICF syndrome, Idiopathic acute eosinophilic pneumonia, Idiopathic CD4 positive T-lymphocytopenia, IL12RB1 deficiency, Immune defect due to absence of thymus, Immune dysfunction with T-cell inactivation due to calcium entry defect 1, Immune dysfunction with T-cell inactivation due to calcium entry defect 2, Immunodeficiency with hyper IgM type 1, Immunodeficiency with hyper IgM type 2, Immunodeficiency with hyper IgM type 3, Immunodeficiency with hyper IgM type 4, Immunodeficiency with hyper IgM type 5, Immunodeficiency with thymoma, Immunodeficiency without anhidrotic ectodermal dysplasia, Immunodysregulation, polyendocrinopathy and enteropathy X-linked, Immunoglobulin A deficiency 2, Intestinal atresia multiple, IRAK-4 deficiency, Isolated growth hormone deficiency type 3, Kawasaki disease, Large granular lymphocyte leukemia, Leukocyte adhesion deficiency type 1, LRBA deficiency, Lupus, Lymphocytic hypophysitis, Majeed syndrome, Melkersson-Rosenthal syndrome, MHC class 1 deficiency, Muckle-Wells syndrome, Multifocal fibrosclerosis, Multiple sclerosis, MYD88 deficiency, Neonatal systemic lupus erythematosus, Netherton syndrome, Neutrophil-specific granule deficiency, Nijmegen breakage syndrome, Omenn syndrome, Osteopetrosis autosomal recessive 7, Palindromic rheumatism, Papillon Lefevre syndrome, Partial androgen insensitivity syndrome, PASLI disease, Pearson syndrome, Pediatric multiple sclerosis, Periodic fever, aphthous stomatitis, pharyngitis and adenitis, PGM3-CDG, Poikiloderma with neutropenia, Pruritic urticarial papules plaques of pregnancy, Purine nucleoside phosphorylase deficiency, Pyogenic arthritis, pyoderma gangrenosum and acne, Relapsing polychondritis, Reticular dysgenesis, Sarcoidosis, Say Barber Miller syndrome, Schimke immunoosseous dysplasia, Schnitzler syndrome, Selective IgA deficiency, Selective IgM deficiency, Severe combined immunodeficiency, Severe combined immunodeficiency due to complete RAG1/2 deficiency, Severe combined immunodeficiency with sensitivity to ionizing radiation, Severe combined immunodeficiency, Severe congenital neutropenia autosomal recessive 3, Severe congenital neutropenia X-linked, Shwachman-Diamond syndrome, Singleton-Merten syndrome, SLC35C1-CDG (CDG-IIc), Specific antibody deficiency, Spondyloenchondrodysplasia, Stevens-Johnson syndrome, T-cell immunodeficiency, congenital alopecia and nail dystrophy, TARP syndrome, Trichohepatoenteric syndrome, Tumor necrosis factor receptor-associated periodic syndrome, Twin to twin transfusion syndrome, Vici syndrome, WHIM syndrome, Wiskott Aldrich syndrome, Woods Black Norbury syndrome, X-linked agammaglobulinemia, X-linked lymphoproliferative syndrome, X-linked lymphoproliferative syndrome 1, X-linked lymphoproliferative syndrome 2, X-linked magnesium deficiency with Epstein-Barr virus infection and neoplasia, X-linked severe combined immunodeficiency, and ZAP-70 deficiency.

[0383] The compositions and methods can also be used to treat autoimmune diseases or disorders. Exemplary autoimmune diseases or disorders, which are not mutually exclusive with the immune system disorders described above, include Achalasia, Addison's disease, Adult Still's disease, Agammaglobulinemia, Alopecia areata, Amyloidosis, Ankylosing spondylitis, Anti-GBM/Anti-TBM nephritis, Antiphospholipid syndrome, Autoimmune angioedema, Autoimmune dysautonomia, Autoimmune encephalomyelitis, Autoimmune hepatitis, Autoimmune inner ear disease (AIED), Autoimmune myocarditis, Autoimmune oophoritis, Autoimmune orchitis, Autoimmune pancreatitis, Autoimmune retinopathy, Autoimmune urticarial, Axonal & neuronal neuropathy (AMAN), Baló disease, Behcet's disease, Benign mucosal pemphigoid, Bullous pemphigoid, Castleman disease (CD), Celiac disease, Chagas disease, Chronic inflammatory demyelinating polyneuropathy (CIDP), Chronic recurrent multifocal osteomyelitis (CRMO), Churg-Strauss Syndrome (CSS) or Eosinophilic Granulomatosis (EGPA), Cicatricial pemphigoid, Cogan's syndrome, Cold agglutinin disease, Congenital heart block, Coxsackie myocarditis, CREST syndrome, Crohn's disease, Dermatitis herpetiformis, Dermatomyositis, Devic's disease (neuromyelitis optica), Discoid lupus, Dressler's syndrome, Endometriosis, Eosinophilic esophagitis (EoE), Eosinophilic fasciitis, Erythema nodosum, Essential mixed cryoglobulinemia, Evans syndrome, Fibromyalgia, Fibrosing alveolitis, Giant cell arteritis (temporal arteritis), Giant cell myocarditis, Glomerulonephritis, Goodpasture's syndrome, Granulomatosis with Polyangiitis, Graves' disease, Guillain-Barre syndrome, Hashimoto's thyroiditis, Hemolytic anemia, Henoch-Schonlein purpura (HSP), Herpes gestationis or pemphigoid gestationis (PG), Hidradenitis Suppurativa (HS) (Acne Inversa), Hypogammalglobulinemia, IgA Nephropathy, IgG4-related sclerosing disease, Immune thrombocytopenic purpura (ITP), Inclusion body myositis (IBM), Interstitial cystitis (IC), Juvenile arthritis, Juvenile diabetes (Type 1 diabetes), Juvenile myositis (JM), Kawasaki disease, Lambert-Eaton syndrome, Leukocytoclastic vasculitis, Lichen planus, Lichen sclerosus, Ligneous conjunctivitis, Linear IgA disease (LAD), Lupus, Lyme disease chronic, Meniere's disease, Microscopic polyangiitis (MPA), Mixed connective tissue disease (MCTD), Mooren's ulcer, Mucha-Habermann disease, Multifocal Motor Neuropathy (MMN) or MMNCB, Multiple sclerosis, Myasthenia gravis, Myositis, Narcolepsy, Neonatal Lupus, Neuromyelitis optica, Neutropenia, Ocular cicatricial pemphigoid, Optic neuritis, Palindromic rheumatism (PR), PANDAS, Paraneoplastic cerebellar degeneration (PCD), Paroxysmal nocturnal hemoglobinuria (PNH), Parry Romberg syndrome, Pars planitis (peripheral uveitis), Parsonnage-Turner syndrome, Pemphigus, Peripheral neuropathy, Perivenous encephalomyelitis, Pernicious anemia (PA), POEMS syndrome, Polyarteritis nodosa, Polyglandular syndromes type I, II, III, Polymyalgia rheumatic, Polymyositis, Postmyocardial infarction syndrome, Postpericardiotomy syndrome, Primary biliary cirrhosis, Primary sclerosing cholangitis, Progesterone dermatitis, Psoriasis, Psoriatic arthritis, Pure red cell aplasia (PRCA), Pyoderma gangrenosum, Raynaud's phenomenon, Reactive Arthritis, Reflex sympathetic dystrophy, Relapsing polychondritis, Restless legs syndrome (RLS), Retroperitoneal fibrosis, Rheumatic fever, Rheumatoid arthritis, Sarcoidosis, Schmidt syndrome, Scleritis, Scleroderma, Sjögren's syndrome, Sperm & testicular autoimmunity, Stiff person syndrome (SPS), Subacute bacterial endocarditis (SBE), Susac's syndrome, Sympathetic ophthalmia (SO), Takayasu's arteritis, Temporal arteritis/Giant cell arteritis, Thrombocytopenic purpura (TTP), Tolosa-Hunt syndrome (THS), Transverse myelitis, Type 1 diabetes, Ulcerative colitis (UC), Undifferentiated connective tissue disease (UCTD), Uveitis, Vasculitis, Vitiligo, Vogt-Koyanagi-Harada Disease, and Wegener's granulomatosis (or Granulomatosis with Polyangiitis (GPA)).

[0384] Effective Amounts

[0385] The effective amount or therapeutically effective amount of a pharmaceutical composition can be a dosage sufficient to treat, inhibit, or alleviate one or more symptoms of a disease or disorder, or to otherwise provide a desired pharmacologic and/or physiologic effect, for example, reducing, inhibiting, or reversing one or more of the underlying pathophysiological mechanisms underlying a disease or disorder such as cancer.

[0386] In some embodiments, administration of the pharmaceutical compositions elicits an anti-cancer response, the amount administered can be expressed as the amount effective to achieve a desired anti-cancer effect in the recipient. For example, in some embodiments, the amount of the pharmaceutical compositions is effective to inhibit the viability or proliferation of cancer cells in the recipient. In some embodiments, the amount of pharmaceutical compositions is effective to reduce the tumor burden in the recipient, or reduce the total number of cancer cells, and combinations thereof. In other embodiments, the amount of the pharmaceutical compositions is effective to reduce one or more symptoms or signs of cancer in a cancer patient. Signs of cancer can include cancer markers, such as PSMA levels in the blood of a patient.

[0387] The effective amount of the pharmaceutical compositions required will vary from subject to subject, depending on the species, age, weight and general condition of the subject, the severity of the disorder being treated, characteristics of the therapeutic compound (including activity, pharmacokinetics, pharmacodynamics, and bioavailability), and its mode of administration. Thus, it is not possible to specify an exact amount for every pharmaceutical compositions. However, an appropriate amount can be determined by one of ordinary skill in the art using only routine experimentation given the disclosed teachings. For example, effective dosages and schedules for administering the pharmaceutical compositions can be determined empirically, and making such determinations is within the skill in the art. For additional guidance, see Remington: The Science and Practice of Pharmacy (Gennaro ed. 20th edition, Williams & Wilkins PA, USA) (2000). In some embodiments, the dosage ranges for the administration of the compositions are those large enough to effect reduction in cancer cell proliferation or viability, or to reduce tumor burden for example.

[0388] The dosage should not be so large as to cause adverse side effects, such as unwanted cross-reactions, anaphylactic reactions, and the like. Generally, the dosage will vary with the age, condition, and sex of the patient, route of administration, whether other drugs are included in the regimen, and the type, stage, and location of the disease to be treated. The dosage can be adjusted by the individual physician in the event of any counter-indications. It will also be appreciated that the effective dosage of the composition used for treatment can increase or decrease over the course of a particular treatment. Changes in dosage can result and become apparent from the results of diagnostic assays.

[0389] In general, a pharmaceutical composition including the CAR T cells can be administered at a dosage of 10⁴ to 10⁹ cells/kg body weight, preferably 10⁵ to 10⁶ cells/kg body weight, including all integer values within those ranges. CAR T cell compositions can also be administered once or multiple times at these dosages. The cells can be administered by using infusion techniques that are commonly known in immunotherapy. The optimal dosage and treatment regime for a particular patient can readily be determined by one skilled in the art of medicine by monitoring the patient for signs of disease and adjusting the treatment accordingly. In some embodiments, the unit dosage is in a unit dosage form for intravenous injection, oral administration, inhalation, or intratumoral injection.

[0390] Treatment can be continued for an amount of time sufficient to achieve one or more desired therapeutic goals, for example, a reduction of the amount of cancer cells relative to the start of treatment, or complete absence of cancer cells in the recipient. The progression of treatment can be monitored using any means known for monitoring the progression of anti-cancer treatment in a patient. In some embodiments, administration is carried out every day of treatment, or every week, or every fraction of a week. In some embodiments, treatment regimens are carried out over the course of up to two, three, four or five days, weeks, or months, or for up to 6 months, or for more than 6 months, for example, up to one year, two years, three years, or up to five years.

[0391] Combination Therapies

[0392] The compositions can be administered alone or in combination with one or more conventional therapies, for example, a conventional therapy for the disease or disorder being treated. In some embodiments, the conventional therapy includes administration of one or more of the compositions in combination with one or more additional active agents. The additional active agent(s) can have the same, or different mechanisms of action. In some embodiments, the combination results in an additive effect on the treatment of the disease or disorder (e.g., cancer). In some embodiments, the combinations result in a more than additive effect on the treatment of the disease or disorder.

[0393] The additional therapy or procedure can be simultaneous or sequential with the administration of the composition. In some embodiments the additional therapy is performed between drug cycles or during a drug holiday that is part of the composition's dosage regime.

[0394] Combination therapy may be achieved by use of a single pharmaceutical composition that includes the therapeutic agents, or by administering two or more distinct compositions at the same or different time. The multiple therapies may be given in either order and may precede or follow the other treatment by intervals ranging from minutes to weeks. In embodiments where the other agents are applied separately, it is preferable to administer the therapies in time frames, such that the agents would still be able to exert an advantageously combined effect on the patient. In such instances, it is contemplated that one may administer both modalities within about 12-24 h of each other and, more preferably, within about 6-12 h of each other. In some situations, it may be desirable to extend the time period for treatment, however, where several days (e.g., 2, 3, 4, 5, 6, 7, 8, 9, 10, or more) to several weeks (e.g., 1, 2, 3, 4, 5, 6, 7, 8 or more) lapse between the respective administrations.

[0395] In some embodiments, the additional therapy or procedure is surgery, radiotherapy, chemotherapy, immunotherapy, cancer vaccines (e.g. dendritic cell vaccine), cryotherapy or gene therapy. Immunotherapy includes, but is not limited to, administration of one or more immune-checkpoint blockage agents. Exemplary immune-checkpoint blockage agents include, but are not limited to, an antibody or antigen-binding fragment thereof, such as an antibody or antigen-binding fragment thereof that is an inhibitor of CTLA-4, PD-1, PD-L1, PD-L2, TIM-3, LAG3, or a combination thereof, such as Pembrolizumab (anti-PD1 mAb), Durvalumab (anti-PDL1 mAb), PDR001 (anti-PD1 mAb), Atezolizumab (anti-PDL1 mAb), Nivolumab (anti-PD1 mAb), Tremelimumab (anti-CTLA4 mAb), Avelumab (anti-PDL1 mAb), Ipilimumab (anti-CTLA4 mAb), and RG7876 (CD40 agonist mAb).

[0396] Additional therapeutic agents that are suitable for used in combination therapy include conventional cancer therapeutics such as chemotherapeutic agents, cytokines, and chemokines. Chemotherapeutic agents that can be used include, but are not limited to, alkylating agents, antimetabolites, antimitotics, anthracyclines, cytotoxic antibiotics, topoisomerase inhibitors, and combinations thereof. Monoclonal antibodies and the tyrosine kinase inhibitors e.g., imatinib mesylate (GLEEVEC® or GLIVEC®), which directly targets a molecular abnormality in certain types of cancer (chronic myelogenous leukemia, gastrointestinal stromal tumors) can also be used. Other suitable anti-cancer agents include angiogenesis inhibitors including antibodies to vascular endothelial growth factor (VEGF) such as bevacizumab (AVASTIN®) and rhuFAb V2 (ranibizumab, LUCENTIS®), other anti-VEGF compounds; thalidomide (THALOMID®) and derivatives thereof such as lenalidomide (REVLIMID®); endostatin; angiostatin; receptor tyrosine kinase (RTK) inhibitors such as sunitinib (SUTENT®); tyrosine kinase inhibitors such as sorafenib (NEXAVAR®), erlotinib (TARCEVA®), pazopanib, axitinib, and lapatinib; transforming growth factor-α or transforming growth factor-β inhibitors, and antibodies to the epidermal growth factor receptor such as panitumumab (VECTIBIX®) and cetuximab (ERBITUX®).

[0397] Additional representative chemotherapeutic agents that can be used include, but are not limited to, amsacrine, bleomycin, busulfan, capecitabine, carboplatin, carmustine, chlorambucil, cisplatin, cladribine, clofarabine, crisantaspase, cyclophosphamide, cytarabine, dacarbazine, dactinomycin, daunorubicin, docetaxel, doxorubicin, epipodophyllotoxins, epirubicin, etoposide, etoposide phosphate, fludarabine, fluorouracil, gemcitabine, hydroxycarb amide, idarubicin, ifosfamide, innotecan, leucovorin, liposomal doxorubicin, liposomal daunorubici, lomustine, mechlorethamine, melphalan, mercaptopurine, mesna, methotrexate, mitomycin, mitoxantrone, oxaliplatin, paclitaxel, pemetrexed, pentostatin, procarbazine, raltitrexed, satraplatin, streptozocin, teniposide, tegafur-uracil, temozolomide, teniposide, thiotepa, tioguanine, topotecan, treosulfan, vinblastine, vincristine, vindesine, vinorelbine, taxol and derivatives thereof, trastuzumab (HERCEPTIN®), cetuximab, and rituximab (RITUXAN® or MABTHERA®), bevacizumab (AVASTIN®), and combinations thereof. Representative pro-apoptotic agents include, but are not limited to, fludarabinetaurosporine, cycloheximide, actinomycin D, lactosylceramide, 15d-PGJ(2)5 and combinations thereof.

[0398] In some embodiments, the compositions and methods are used prior to or in conjunction with surgical removal of tumors, for example, in preventing primary tumor metastasis. In some embodiments, the compositions and methods are used to enhance the body's own anti-tumor immune functions.

### V. Kits

[0399] The gene editing compositions, reagents, compositions and other materials can be packaged together in any suitable combination as a kit useful for performing, or aiding in the performance of, the methods. It is useful if the components in a given kit are designed and adapted for use together in the method. For example, kits with one or more compositions for administration to a subject, may include a pre-measured dosage of the composition in a sterile needle, ampule, tube, container, or other suitable vessel. The kits may include instructions for dosages and dosing regimens.

[0400] Provided are kits containing an RNA-guided endonuclease (e.g., Cpf1), an AAV crRNA library, and instructional material for use thereof. In preferred embodiments, the library includes a plurality of vectors, where each vector independently contains a crRNA expression cassette encoding one or more crRNAs (e.g., 2 distinct crRNAs) and optionally, a CAR expression cassette. In some embodiments, the kit can contain a population of cells (e.g., T cells) collectively containing the AAV crRNA library. The instructional material can include a publication, a recording, a diagram, or any other medium of expression which can be used to communicate the usefulness of the compositions and methods of the kit. For example, the instructional material may provide instructions for methods using the kit components, such as performing transfections, transductions, infections, and conducting screens.

[0401] It is to be understood that the methods and compositions are not limited to specific synthetic methods, specific analytical techniques, or to particular reagents unless otherwise specified, and, as such, can vary. It is also to be understood that the terminology used is for the purpose of describing particular embodiments only and is not intended to be limiting.

[0402] The present invention can be further understood by reference to the following number paragraphs.

[0403] 1. A library comprising a plurality of two or more vectors, each vector comprising:
[0404] one or more inverted terminal repeat (ITR) sequences, a 5′ homology arm, a crRNA expression cassette, a chimeric antigen receptor (CAR) expression cassette, and a 3′ homology arm.

[0405] 2. The library of paragraph 1, wherein the crRNA expression cassette of each vector independently encodes a first guide RNA and a second guide RNA, wherein the first guide RNA is identical across the plurality of vectors.

[0406] 3. The library of paragraphs 1 or 2, wherein the second guide RNA is unique to each vector across the plurality of vectors.

[0407] 4. The library of any one of paragraphs 1-3, wherein one or more sequences encoding the one or more of the encoded guide RNAs of the library are selected from the group consisting of SEQ ID NOs:3-12,134.

[0408] 5. The library of any one of paragraphs 1-4, wherein the library collectively comprises from about 100 to about 300,000, from about 1,000 to about 5,000 or from about 5000, to about 10,000 distinct guide RNAs.

[0409] 6. The library of any one of paragraphs 1-7, wherein the library collectively comprises guide RNAs encoded by SEQ ID NOs:3-4,087 (Rene library), SEQ ID NOs:4,088-12,134 (Descartes library), or SEQ ID NOs:3-12,134.

[0410] 7. The library of any one of paragraphs 1-6, wherein each crRNA expression cassette comprises a U6 promoter operably linked to sequences encoding one or more guide RNAs.

[0411] 8. The library of any one of paragraphs 1-7, wherein each crRNA expression cassette comprises sequences encoding a first guide RNA and a second guide RNA.

[0412] 9. The library of any one of paragraphs 1-8, wherein the CAR expression cassette comprises an EFS promoter and/or a polyadenylation signal sequence operationally linked to a sequence encoding the CAR.

[0413] 10. The library of any one of paragraphs 1-9, wherein the crRNA expression cassette and/or CAR expression cassette of each vector are positioned between the 5′ and 3′ homology arms.

[0414] 11. The library of any one of paragraphs 1-10, wherein the 5′ and 3′ homology arms are homologous to the TRAC locus.

[0415] 12. The library of any one of paragraphs 1-11, wherein each vector encodes at least one guide RNA targeting the TRAC locus.

[0416] 13. The library of any one of paragraphs 1-12, wherein the CAR targets one or more cancer specific antigens or cancer associated antigens.

[0417] 14. The library of any one of paragraphs 1-13, wherein the CAR is an anti-CD19 CAR or anti-CD22 CAR.

[0418] 15. The library of any one of paragraphs 2-14, wherein the second guide RNA targets a gene involved in T cell exhaustion, T cell proliferation, T cell co-stimulation, memory T cell differentiation, T cell receptor signaling, epigenetic regulation, adaptive immune response, immune response to tumor cells, other immune functions, or combinations thereof.

[0419] 16. The library of any one of paragraphs 1-15, wherein the vector comprises the nucleotide sequence of SEQ ID NO:1 or SEQ ID NO:2 with or without the sequence encoding the TRAC targeting crRNA, with or without one or more additional crRNA encoding sequences optionally inserted at the BbsI cloning site, and/or with the existing CAR encoding sequence or another CAR encoding sequence substituted therefore, or a sequence variant having 75% or more sequence identity to any of the foregoing.

[0420] 17. The library of any one of paragraphs 1-16, wherein each vector is a viral vector, preferably an adeno-associated virus (AAV) vector, optionally wherein the AAV is AAV6.

[0421] 18. A vector of any one of paragraphs 1-17.

[0422] 19. A population of cells comprising an AAV vector of paragraph 18.

[0423] 20. A population of cells collectively comprising the library of any one of paragraphs 1-17, optionally wherein each cell comprises at most one or two AAV vectors comprised in the library.

[0424] 21. A method of identifying one or more genes that enhance a desired phenotype of a cell comprising a CAR, the method comprising:
[0425] (a) contacting the population of cells of paragraph 20 with an RNA-guided endonuclease under conditions suitable for genomic integration and expression of the guide RNAs and CAR contained in the vectors; and
[0426] (b) selecting for cells exhibiting the desired phenotype.

[0427] 22. The method of paragraph 21, wherein the crRNA expression cassette and CAR expression cassette are integrated into the TRAC locus.

[0428] 23. The method of paragraph 21 or 22, wherein the RNA-guided endonuclease is provided as an mRNA that encodes the RNA-guided endonuclease, a viral vector that encodes the RNA-guided endonuclease, or an RNA-guided endonuclease protein or a complex of the RNA-guided endonuclease protein and RNA.

[0429] 24. The method of paragraph 23, wherein the RNA-guided endonuclease is provided by electroporation.

[0430] 25. The method of any one of paragraphs 21-24, wherein the RNA-guided endonuclease is Cpf1 or an active variant, derivative, or fragment thereof.

[0431] 26. The method of any one of paragraphs 21-25, wherein the desired phenotype is selected from the group comprising increased tumor/tumor microenvironment infiltration, increased or optimized target cell affinity, increased target cell cytotoxicity, increased persistence, increased expansion/proliferation, reduced exhaustion, increased anti-cancer metabolic function, increased ability to prevent immune escape, reduced unspecific cytokine production, reduced off-target toxicity, reduced cytokine release syndrome (CRS), and combinations thereof.

[0432] 27. The method of any one of paragraphs 21-26, wherein the step of selecting comprises co-culturing the population of cells with target cells comprising one or more antigens recognized by the CAR for a defined time period, flow cytometry-based or affinity-based sorting, immune marker-based selection, in vivo tumor infiltration, CAR-antigen interaction, directed evolution, or combinations thereof.

[0433] 28. The method of paragraph 27, wherein the population of cells is repeatedly co-cultured with the target cells.

[0434] 29. The method of paragraph 27 or 28, wherein the time period comprises from about 1 to about 60 days.

[0435] 30. The method of any one of paragraphs 27-29, wherein the target cells comprise cancer cells.

[0436] 31. The method of any one of paragraphs 21-30, further comprising identifying the crRNA expression cassette present in the selected cells.

[0437] 32. The method of paragraph 31, wherein the step of identifying the crRNA expression cassette comprises sequencing genomic DNA of the selected cells.

[0438] 33. The method of paragraph 31 or 32, wherein the one or more genes that enhance a desired phenotype are identified as genes targeted by the guide RNAs encoded by the crRNA expression cassette.

[0439] 34. The method of any one of paragraphs 21-33, wherein the population of cells comprises effector T cells, memory T cells, central memory T cells, effector memory T cells, Th1 cells, Th2 cells, Th3 cells, Th9 cells, Th17 cells, Tfh cells, Treg cells, gamma-delta T cells, hematopoietic stem cells (HSC), macrophages, natural killer cells (NK), B cells, dendritic cells (DC), or other immune cells.

[0440] 35. The method of paragraph 34, wherein the T cells are CD4⁺ or CD8⁺ T cells.

[0441] 36. An isolated CAR T cell comprising a CAR and one or more mutations in one or more genes identified by the method of any one of paragraphs 21-35.

[0442] 37. The CAR T cell of paragraph 36, wherein the one or more mutations cause reduced function of the one or more genes or gene products thereof.

[0443] 38. The CAR T cell of paragraph 36 or 37, wherein the one or more genes is selected from the group comprising PRDM1, DPF3, SLAMF1, TET2, HFE, PELI1, PDCD1, HAVCR2IM3, TET2, NR4A2, LAIR1, and USB1.

[0444] 39. The CAR T cell of any one of paragraphs 36-38, wherein the cell exhibits increased memory, increased cell proliferation, increased persistence, increased cytotoxicity towards a target cell, decreased T cell terminal differentiation, and/or reduced T cell exhaustion compared to a CAR T cell not comprising the one or more mutations in the one or more genes.

[0445] 40. A population of CAR T cells derived by expanding the CAR T cell of any one of paragraphs 36-39.

[0446] 41. A pharmaceutical composition comprising the population of CAR T cells of paragraph 40 and a pharmaceutically acceptable buffer, carrier, diluent or excipient.

[0447] 42. A method of treating a subject having a disease, disorder, or condition comprising administering to the subject an effective amount of the pharmaceutical composition of paragraph 41.

[0448] 43. The method of paragraph 42, wherein the disease, disorder, or condition is associated with an elevated expression or specific expression of an antigen.

[0449] 44. The method of paragraph 43, wherein the CAR T cell targets the antigen.

[0450] 45. The method of any one of paragraphs 42-44, wherein the cell was isolated from a healthy donor or from the subject having the disease, disorder, or condition prior to the introduction of the one or more mutations in the one or more genes.

[0451] 46. The method of any one of paragraphs 42-45, wherein the disease, disorder, or condition is a cancer, an inflammatory disease, a neuronal disorder, HIV/AIDS, diabetes, a cardiovascular disease, an infectious disease, or an autoimmune disease.

[0452] 47. The method of paragraph 46, wherein the cancer is a leukemia or lymphoma selected from the group comprising chronic lymphocytic leukemia (CLL), acute lymphocytic leukemia (ALL), acute myeloid leukemia (AML), chronic myelogenous leukemia (CML), mantle cell lymphoma, non-Hodgkin's lymphoma, and Hodgkin's lymphoma.

[0453] 48. The method of any one of paragraphs 42-47, wherein the subject is a human.

[0454] 49. A cell comprising a heterologous nucleic acid construct comprising one or more crRNA expression cassettes comprising a nucleic acid sequence encoding one or more guide RNAs selected from the group consisting of SEQ ID NOs:3-12,134 and a chimeric antigen receptor (CAR) expression cassette.

[0455] 50. A cell comprising a heterologous nucleic acid construct encoding a chimeric antigen receptor (CAR) expression cassette and reduced or eliminated expression at one or more gene loci targeted by one or more guide RNAs selected from the group consisting of SEQ ID NOs:3-12,134 and.

[0456] 51. The cell of paragraphs 49 and 50, wherein the heterologous nucleic acid construct is present in the cell's genome at the TRAC gene locus, and optionally wherein the CAR is an anti-CD19 or anti-CD22 CAR.

[0457] The present invention will be further understood by reference to the following non-limiting examples.

### EXAMPLES

### Example 1: Establishment of the CLASH System for Massively Parallel CAR-T Engineering

### Materials and Methods

[0458] Design and Generation of CLASH AAV Construct

[0459] To generate the CLASH AAV vector (pAAV-LHA-U6-DR-cfTRAC-DR-BbsI-EFS-CAR-scFv-RHA, or pXD60), the TRAC HDR arms and CD22BBz/CD19BBz CAR were amplified as previously reported (Dai X., et al., Nat. Methods, 16:247-254 (2019)). The crRNA cassette which contains one guide targeting the first exon of the TRAC locus and double BbsI cutting sites, was inserted after the left TRAC arm. Different fragments were cloned using Gibson assembly and traditional restriction cloning.

[0460] Design of Rene and Descartes Cas12a/Cpf1 crRNA Libraries

[0461] The Descartes library contains 8,047 crRNAs (SEQ ID NOs:4,088-12,134), targeting 954 genes (see Table 2) with ˜8 crRNAs per gene and 1000 non-targeting controls (NTCs). Genes of interest were chosen as a superset from the following gene lists: T cell exhaustion (Wherry E J., et al., Immunity 27, 670-684 (2007)), epigenetic regulators (Arrowsmith C H., et al., Nature reviews Drug discovery 11, 384-400 (2012)), T cell co-stimulation (GO: 0031295), memory T cell differentiation (GO: 0043379), T cell receptor signaling pathway (GO: 0050852), adaptive immune response (GO: 0002250), immune response to tumor cell (GO: 0002418), T cell proliferation (GO: 0042098), and TE72. The Rene library contains 4,085 crRNAs (SEQ ID NOs:3-4,087) targeting 472 genes (see Table 3) including T cell exhaustion, epigenetic regulators, T cell co-stimulation (GO: 0031295), memory T cell differentiation (GO: 0043379), and TE72. A total of 500 non-targeting control (NTC) crRNAs were spiked into the Rene library. All crRNAs were scored for selection using Deep Cpf1 (Kim H K., et al., Nat Biotechnol., 36(3):239-241 (2018)).

TABLE 2
Genes targeted by crRNAs in the Descartes library.

| | | | | | | | |
|---|---|---|---|---|---|---|---|
| ABL1 | ACTN1 | ADA | ADAM15 | ADAM17 | ADGRE1 | ADGRG1 | ADRB3 |
| AEBP2 | AGER | AGFG1 | AHR | AICDA | AIF1 | AIRE | AKAP1 |
| AKT1 | ALCAM | ALOX15 | ANXA1 | APCS | APLF | ARG1 | ARG2 |
| ARHGEF15 | ARID4A | ARID4B | ART3 | ASH1L | ASXL1 | ASXL3 | ATAD2 |
| ATAD2B | ATAD5 | ATAT1 | ATF1 | B2M | BATF | BAX | BAZ1A |
| BAZ1B | BAZ2A | BAZ2B | BCAN | BCAR1 | BCL10 | BCL2 | BCL3 |
| BCL6 | BCLAF3 | BLM | BMP4 | BMX | BPTF | BRD1 | BRD2 |
| BRD3 | BRD4 | BRD7 | BRD8 | BRD9 | BRDT | BRPF1 | BRPF3 |
| BRWD1 | BRWD3 | BTK | BTLA | BTN1A1 | BTN2A1 | BTN2A2 | BTN3A1 |
| BTN3A2 | BTN3A3 | BTNL2 | BTNL3 | BTNL8 | BTNL9 | BUB1 | C17orf99 |
| C1QA | C1QB | C1QBP | C1QC | C1R | C1RL | C1S | C2 |
| C20orf196 | C3 | C4A | C4B | C4BPA | C4BPB | C5 | C6 |
| C7 | C8A | C8B | C8G | C9 | CA2 | CACNA1F | CADM1 |
| CALU | CAMK4 | CARD11 | CARM1 | CASP3 | CAV1 | CBX1 | CBX2 |
| CBX3 | CBX4 | CBX5 | CBX6 | CBX7 | CBX8 | CCDC88B | CCL19 |
| CCL21 | CCL3 | CCL4 | CCL5 | CCND3 | CCR2 | CCR6 | CCR7 |
| CCRL2 | CD151 | CD160 | CD1A | CD1B | CD1C | CD1D | CD1E |
| CD200 | CD209 | CD226 | CD24 | CD244 | CD247 | CD27 | CD274 |
| CD276 | CD28 | CD300A | CD3D | CD3E | CD3G | CD4 | CD40 |
| CD40LG | CD46 | CD48 | CD5 | CD55 | CD6 | CD7 | CD74 |
| CD79A | CD79B | CD80 | CD84 | CD86 | CD8A | CD8B | CD9 |
| CDC42 | CDH4 | CDY1 | CDY2A | CDYL | CDYL2 | CEACAM1 | CEBPB |
| CECR2 | CFI | CHD1 | CHD2 | CHD3 | CHD4 | CHD5 | CHD6 |
| CHD7 | CHD8 | CHD9 | CHUK | CKS2 | CLC | CLCF1 | CLEC10A |
| CLEC4A | CLEC4C | CLEC4D | CLEC4G | CLEC4M | CLEC6A | CLECL1 | CLIP1 |
| CLIP4 | CLOCK | CLU | COCH | COL7A1 | CORO1A | CR1 | CR2 |
| CRACR2A | CREBBP | CRLF1 | CRP | CRTAM | CSK | CTLA4 | CTNNB1 |
| CTPS1 | CTSC | CTSH | CTSL | CTSS | CXCL13 | CXCR4 | CXXC1 |
| CYLD | CYP4V2 | DBNL | DCLRE1C | DDIT4 | DENND1B | DENND5A | DHPS |
| DIDO1 | DLG1 | DLG5 | DMRTC2 | DNAH12 | DNAJA3 | DND1 | DNMT3A |
| DNMT3B | DOCK2 | DOCK3 | DOCK8 | DOT1L | DPF1 | DPF2 | DPF3 |
| DPP4 | DPPA3 | DQX1 | DUSP1 | DUSP10 | DUSP22 | DUSP3 | DYNLT3 |
| EBI3 | EFNB1 | EFNB3 | EGR2 | EHMT1 | EHMT2 | EIF2AK4 | EIF2B1 |
| EIF2B2 | EIF2B3 | EIF2B4 | EIF2B5 | ELF1 | ELF4 | ELP3 | EMP2 |
| ENTPD1 | EOMES | EP300 | EPO | ERAP1 | ERAP2 | ERAS | ERBB2 |
| ERCC1 | ERMAP | EXO1 | EXOSC3 | EXOSC6 | EZH1 | EZH2 | EZR |
| FABP3 | FADD | FAM35A | FAM49B | FASLG | FCAMR | FCER1G | FCER2 |
| FCGR1B | FCGR2B | FCRL4 | FGA | FGB | FKBP14 | FKBP1B | FKBP7 |
| FMR1 | FOXJ1 | FOXP3 | FSD1 | FXR2 | FYB1 | FYB2 | FYN |
| FZD5 | G2E3 | GABBR1 | GAPT | GAS2 | GATA3 | GBP1 | GCNT3 |
| GLMN | GLYR1 | GNL1 | GNRH1 | GPAM | GPD2 | GPNMB | GPR162 |
| GPR180 | GPR183 | GPR65 | GRAP2 | GRB2 | GRIK5 | GTF3C4 | HAT1 |
| HAVCR2 | HDAC1 | HDAC10 | HDAC11 | HDAC2 | HDAC3 | HDAC4 | HDAC5 |
| HDAC6 | HDAC7 | HDAC8 | HDAC9 | HDGF | HDGFL1 | HDGFL2 | HDGFL3 |
| HES1 | HFE | HHLA2 | HLA-A | HLA-B | HLA-C | HLA-DMB | HLA-DPA1 |
| HLA-DPB1 | HLA-DQA1 | HLA-DQA2 | HLA-DQB1 | HLA-DQB2 | HLA-DRA | HLA-DRB1 | HLA-DRB5 |
| HLA-E | HLA-F | HLA-G | HLX | HMGB1 | HMHB1 | HORMAD1 | HPX |
| HRAS | HRG | HSPD1 | ICAM1 | ICOS | ICOSLG | IDO1 | IER5 |
| IFNA1 | IFNA10 | IFNA14 | IFNA16 | IFNA17 | IFNA2 | IFNA21 | IFNA4 |
| IFNA5 | IFNA6 | IFNA7 | IFNA8 | IFNB1 | IFNE | IFNG | IFNK |
| IFNL1 | IFNW1 | IGF1 | IGF2 | IGFBP2 | IGLL1 | IGLL5 | IGLON5 |
| IHH | IKBKB | IKBKG | IL10 | IL12A | IL12B | IL12RB1 | IL13RA2 |
| IL15 | IL18 | IL18BP | IL18R1 | IL18RAP | IL1B | IL1R1 | IL1RL1 |
| IL2 | IL20RB | IL21 | IL23A | IL23R | IL27 | IL27RA | IL2RA |
| IL31RA | IL33 | IL4 | IL4R | IL6 | IL6R | IL6ST | IL7R |
| ING1 | ING2 | ING3 | ING4 | ING5 | INPP5D | INTS12 | IRF1 |
| IRF4 | IRF7 | IRF8 | ISG15 | ISG20 | ITCH | ITGAV | ITK |
| ITM2A | ITPR2 | JADE1 | JADE2 | JADE3 | JAG1 | JAK2 | JAK3 |
| JAM3 | JARID2 | JCHAIN | JMJD1C | KAT2A | KAT2B | KAT5 | KAT6A |
| KAT6B | KAT7 | KAT8 | KCNN4 | KDELR1 | KDM1A | KDM1B | KDM2A |
| KDM2B | KDM3A | KDM3B | KDM4A | KDM4B | KDM4C | KDM4D | KDM4E |
| KDM5A | KDM5B | KDM5C | KDM5D | KDM6A | KDM6B | KDM7A | KDM8 |
| KLHL6 | KLK1 | KLK6 | KLRK1 | KMT2A | KMT2B | KMT2C | KMT2D |
| KMT2E | KMT5A | KMT5B | KMT5C | L3MBTL1 | L3MBTL2 | L3MBTL3 | L3MBTL4 |
| LAG3 | LAIR1 | LAMP3 | LAT | LAT2 | LAX1 | LBR | LCK |
| LCP2 | LEF1 | LEP | LGALS1 | LGALS3 | LGALS9 | LIG4 | LILRA1 |
| LILRA6 | LILRB1 | LILRB2 | LILRB3 | LILRB4 | LILRB5 | LIME1 | LMO1 |
| LOXL3 | LRRC32 | LTA | LY75 | LY9 | LYN | MAD1L1 | MAD2L2 |
| MALT1 | MAN2B1 | MANSC1 | MAP3K1 | MAP3K7 | MAP3K8 | MAP7D2 | MAPK1 |
| MARCH7 | MARCH8 | MASP2 | MBD5 | MBL2 | MBTD1 | MCOLN1 | MCOLN2 |
| MDFIC | MECOM | MEF2C | MEF2D | MICA | MICB | MLH1 | MLLT10 |
| MLLT6 | MOG | MORF4L1 | MPHOSPH8 | MSH2 | MSH6 | MSL3 | MSN |
| MTF2 | MTMR7 | MUM1 | MYH10 | MYO1G | NAMPT | NBN | NCK1 |
| NCK2 | NCKAP1L | NCOA1 | NCOA3 | NCSTN | NDFIP1 | NDUFA5 | NECTIN2 |
| NFATC1 | NFKB1 | NFKB2 | NFKBID | NFKBIZ | NLRP10 | NLRP3 | NR4A2 |
| NRIP1 | NSD1 | NSD2 | NSD3 | OTUB1 | OTUD7B | P2RX4 | P2RX7 |
| PAG1 | PAK1 | PAK2 | PAK3 | PAWR | PAXIP1 | PBRM1 | PBX3 |
| PDCD1 | PDCD1LG2 | PDE4B | PDE4D | PDE5A | PDPK1 | PELI1 | PENK |
| PHF1 | PHF10 | PHF11 | PHF12 | PHF13 | PHF14 | PHF19 | PHF2 |
| PHF20 | PHF20L1 | PHF21A | PHF21B | PHF23 | PHF3 | PHF5A | PHF6 |
| PHF7 | PHF8 | PHIP | PHPT1 | PHRF1 | PIK3CA | PIK3CB | PIK3CD |
| PIK3CG | PIK3R1 | PIK3R2 | PKN1 | PLA2G2D | PLA2G2F | PLCG1 | PLCG2 |
| PLSCR1 | PNP | POU2F2 | PPM1B | PPP3CB | PRDM1 | PRDM10 | PRDM11 |
| PRDM12 | PRDM13 | PRDM14 | PRDM15 | PRDM16 | PRDM2 | PRDM4 | PRDM5 |
| PRDM6 | PRDM7 | PRDM8 | PRDM9 | PRF1 | PRKAR1A | PRKAR1B | PRKCB |
| PRKCD | PRKCQ | PRKCZ | PRKD2 | PRMT1 | PRMT2 | PRMT3 | PRMT5 |
| PRMT6 | PRMT7 | PRMT8 | PRNP | PRR36 | PRR7 | PSEN1 | PSIP1 |
| PTGER2 | PTGER4 | PTK2B | PTPN11 | PTPN13 | PTPN2 | PTPN22 | PTPN6 |
| PTPRC | PTPRJ | PVR | PVRIG | PWWP2B | PXDN | PYCARD | PYGO1 |
| PYGO2 | RAB27A | RAB29 | RAC1 | RAC2 | RAET1E | RAET1G | RAET1L |
| RAG1 | RAG2 | RAI1 | RASAL3 | RBCK1 | RBPJ | RC3H1 | RC3H2 |
| RCN1 | RELA | RELB | RFTN1 | RGS16 | RIF1 | RIOX1 | RIOX2 |
| RIPK2 | RIPK3 | RNF11 | RNF125 | RNF168 | RNF17 | RNF19B | RNF31 |
| RNF8 | RORA | RORC | RPH3A | RPS3 | RPS6 | RSAD2 | RSF1 |
| RYR1 | SAMSN1 | SASH3 | SATB1 | SCGB1A1 | SCMH1 | SCML2 | SDC4 |
| SEC61A2 | SELENOK | SEMA4A | SEPT1 | SERPINA1 | SERPING1 | SETD1A | SETD2 |
| SETD3 | SETD4 | SETD5 | SETD6 | SETD7 | SETDB1 | SETDB2 | SETMAR |
| SFMBT1 | SFMBT2 | SFTPD | SGF29 | SH2D1A | SH2D1B | SH2D2A | SH3RF1 |
| SHH | SHPRH | SIGLEC10 | SIRT1 | SIRT2 | SIRT3 | SIRT4 | SIRT5 |
| SIRT6 | SIRT7 | SIT1 | SKAP1 | SLA2 | SLAMF1 | SLAMF6 | SLAMF7 |
| SLC11A1 | SLC12A2 | SLC39A3 | SMAD1 | SMAD7 | SMARCA2 | SMARCA4 | SMARCC1 |
| SMARCC2 | SMN1 | SMNDC1 | SMO | SMYD1 | SMYD2 | SMYD3 | SMYD4 |
| SMYD5 | SND1 | SOCS3 | SOCS5 | SOS1 | SP100 | SP110 | SP140 |
| SP140L | SPN | SPP1 | SPPL3 | SPRED2 | SPRY2 | SPTB | SRC |
| SRSF7 | STAG3 | STAT3 | STAT5B | STAT6 | STK11 | STK31 | STOML2 |
| STX1B | STX7 | SUPT6H | SUSD4 | SUV39H1 | SUV39H2 | SWAP70 | SYK |
| TAB2 | TAF1 | TAF1L | TAF3 | TANK | TAP1 | TAP2 | TARM1 |
| TBX21 | TCEAL9 | TCF19 | TCF20 | TDRD1 | TDRD10 | TDRD12 | TDRD15 |
| TDRD3 | TDRD5 | TDRD6 | TDRD7 | TDRD9 | TDRKH | TEC | TESPA1 |
| TET2 | TFE3 | TFEB | TFRC | TGFB1 | TGFBR2 | THEMIS | THEMIS2 |
| THOC1 | THY1 | TLR4 | TLR8 | TMEM116 | TMEM131L | TMEM43 | TMEM47 |
| TMIGD2 | TNF | TNFAIP3 | TNFRSF11A | TNFRSF13B | TNFRSF13C | TNFRSF14 | TNFRSF17 |
| TNFRSF21 | TNFRSF4 | TNFRSF9 | TNFSF13 | TNFSF13B | TNFSF14 | TNFSF18 | TNFSF4 |
| TNFSF9 | TP53BP1 | TRAF2 | TRAF6 | TRAT1 | TRIM24 | TRIM27 | TRIM28 |
| TRIM33 | TRIM47 | TRPM4 | TSC1 | TUBB2A | TWSG1 | TXK | UBASH3A |
| UBE2N | UBR7 | UHRF1 | UHRF2 | ULBP1 | ULBP2 | ULBP3 | UNC13D |
| UNC93B1 | UNG | USB1 | USP49 | UTY | VAV1 | VCAM1 | VIPR1 |
| VTCN1 | WAS | WNT4 | XCL1 | YES1 | ZAP70 | ZBTB1 | ZBTB7B |
| ZC3H12A | ZCWPW1 | ZCWPW2 | ZFP91 | ZGPAT | ZMYND11 | ZMYND8 | ZNF683 |
| ZP3 | ZP4 | | | | | | |

TABLE 3
Genes targeted by crRNAs in the Rene library.

| | | | | | | | |
|---|---|---|---|---|---|---|---|
| ACTN1 | ADGRG1 | ADRB3 | AEBP2 | AGFG1 | AHR | AIRE | AKAP1 |
| AKT1 | ARHGEF15 | ARID4A | ARID4B | ART3 | ASH1L | ASXL1 | ASXL3 |
| ATAD2 | ATAD2B | ATAT1 | ATF1 | BAZ1A | BAZ1B | BAZ2A | BAZ2B |
| BCAN | BCL2 | BCLAF3 | BPTF | BRD1 | BRD2 | BRD3 | BRD4 |
| BRD7 | BRD8 | BRD9 | BRDT | BRPF1 | BRPF3 | BRWD1 | BRWD3 |
| BTLA | BUB1 | CA2 | CALU | CARD11 | CARM1 | CASP3 | CAV1 |
| CBX1 | CBX2 | CBX3 | CBX4 | CBX5 | CBX6 | CBX7 | CBX8 |
| CCL19 | CCL21 | CCL3 | CCL4 | CCR7 | CCRL2 | CD160 | CD200 |
| CD24 | CD244 | CD274 | CD28 | CD3E | CD40LG | CD46 | CD5 |
| CD7 | CD80 | CD86 | CD9 | CDC42 | CDH4 | CDY1 | CDY2A |
| CDYL | CDYL2 | CECR2 | CHD1 | CHD2 | CHD3 | CHD4 | CHD5 |
| CHD6 | CHD7 | CHD8 | CHD9 | CKS2 | CLIP1 | CLIP4 | CLOCK |
| COCH | COL7A1 | CREBBP | CRLF1 | CSK | CTLA4 | CXCR4 | CXXC1 |
| CYP4V2 | DDIT4 | DENND5A | DIDO1 | DMRTC2 | DNAH12 | DND1 | DNMT3A |
| DNMT3B | DOCK3 | DOT1L | DPF1 | DPF2 | DPF3 | DPP4 | DPPA3 |
| DQX1 | DUSP1 | DUSP10 | DYNLT3 | EFNB1 | EFNB3 | EGR2 | EHMT1 |
| EHMT2 | ELP3 | ENTPD1 | EOMES | EP300 | ERAS | EZH1 | EZH2 |
| FABP3 | FASLG | FKBP14 | FKBP7 | FMR1 | FSD1 | FXR2 | FYN |
| G2E3 | GABBR1 | GAS2 | GLYR1 | GPD2 | GPR162 | GPR180 | GPR65 |
| GRAP2 | GRB2 | GRIK5 | GTF3C4 | HAT1 | HDAC1 | HDAC10 | HDAC11 |
| HDAC2 | HDAC3 | HDAC4 | HDAC5 | HDAC6 | HDAC7 | HDAC8 | HDAC9 |
| HDGF | HDGFL1 | HDGFL2 | HDGFL3 | HHLA2 | HORMAD1 | ICOS | ICOSLG |
| IER5 | IFNL1 | IGLON5 | IL12B | IL12RB1 | IL23A | IL23R | IL6ST |
| ING1 | ING2 | ING3 | ING4 | ING5 | INTS12 | IRF8 | ISG15 |
| ISG20 | ITGAV | ITM2A | ITPR2 | JADE1 | JADE2 | JADE3 | JAK3 |
| JARID2 | JMJD1C | KAT2A | KAT2B | KAT5 | KAT6A | KAT6B | KAT7 |
| KAT8 | KDM1A | KDM1B | KDM2A | KDM2B | KDM3A | KDM3B | KDM4A |
| KDM4B | KDM4C | KDM4D | KDM4E | KDM5A | KDM5B | KDM5C | KDM5D |
| KDM6A | KDM6B | KDM7A | KDM8 | KLK1 | KLK6 | KLRK1 | KMT2A |
| KMT2B | KMT2C | KMT2D | KMT2E | KMT5A | KMT5B | KMT5C | L3MBTL1 |
| L3MBTL2 | L3MBTL3 | L3MBTL4 | LAG3 | LBR | LCK | LGALS1 | LILRB4 |
| LY75 | LYN | MAN2B1 | MANSC1 | MAP3K1 | MAP3K8 | MAP7D2 | MBD5 |
| MBTD1 | MDFIC | MECOM | MEF2D | MLLT10 | MLLT6 | MORF4L1 | MPHOSPH8 |
| MSH6 | MSL3 | MTF2 | MTMR7 | MUM1 | MYH10 | NAMPT | NCOA1 |
| NCOA3 | NDFIP1 | NDUFA5 | NFATC1 | NR4A2 | NRIP1 | NSD1 | NSD2 |
| NSD3 | P2RX4 | PAK1 | PAK2 | PAK3 | PBRM1 | PBX3 | PDCD1 |
| PDCD1LG2 | PDPK1 | PENK | PHF1 | PHF10 | PHF11 | PHF12 | PHF13 |
| PHF14 | PHF19 | PHF2 | PHF20 | PHF20L1 | PHF21A | PHF21B | PHF23 |
| PHF3 | PHF5A | PHF6 | PHF7 | PHF8 | PHIP | PHRF1 | PIK3CA |
| PIK3R1 | PLSCR1 | PPM1B | PRDM1 | PRDM10 | PRDM11 | PRDM12 | PRDM13 |
| PRDM14 | PRDM15 | PRDM16 | PRDM2 | PRDM4 | PRDM5 | PRDM6 | PRDM7 |
| PRDM8 | PRDM9 | PRKAR1B | PRMT1 | PRMT2 | PRMT3 | PRMT5 | PRMT6 |
| PRMT7 | PRMT8 | PRR36 | PSIP1 | PTGER2 | PTGER4 | PTPN11 | PTPN13 |
| PTPN6 | PWWP2B | PXDN | PYGO1 | PYGO2 | RAC1 | RAG2 | RAI1 |
| RBPJ | RCN1 | RGS16 | RIOX1 | RIOX2 | RNF11 | RNF17 | RPH3A |
| RSF1 | RYR1 | SCMH1 | SCML2 | SEC61A2 | SEPT1 | SERPINA1 | SETD1A |
| SETD2 | SETD3 | SETD4 | SETD5 | SETD6 | SETD7 | SETDB1 | SETDB2 |
| SETMAR | SFMBT1 | SFMBT2 | SGF29 | SH2D2A | SHPRH | SIRT1 | SIRT2 |
| SIRT3 | SIRT4 | SIRT5 | SIRT6 | SIRT7 | SLC12A2 | SLC39A3 | SMAD1 |
| SMARCA2 | SMARCA4 | SMARCC1 | SMARCC2 | SMN1 | SMNDC1 | SMO | SMYD1 |
| SMYD2 | SMYD3 | SMYD4 | SMYD5 | SND1 | SOCS3 | SP100 | SP110 |
| SP140 | SP140L | SPP1 | SPRED2 | SPRY2 | SPTB | SRC | SRSF7 |
| STAG3 | STK31 | STX1B | SUV39H1 | SUV39H2 | TAF1 | TAFIL | TAF3 |
| TANK | TCEAL9 | TCF19 | TCF20 | TDRD1 | TDRD10 | TDRD12 | TDRD15 |
| TDRD3 | TDRD5 | TDRD6 | TDRD7 | TDRD9 | TDRKH | TET2 | TMEM116 |
| TMEM43 | TMEM47 | TMIGD2 | TNFRSF13C | TNFRSF14 | TNFRSF9 | TNFSF13B | TNFSF14 |
| TNFSF4 | TP53BP1 | TRIM24 | TRIM28 | TRIM33 | TRIM47 | TSC1 | TUBB2A |
| UBR7 | UHRF1 | UHRF2 | USB1 | USP49 | UTY | VAV1 | VCAM1 |
| VIPR1 | YES1 | ZCWPW1 | ZCWPW2 | ZFP91 | ZGPAT | ZMYND11 | ZMYND8 |

[0462] Library and Individual crRNA Cloning and Preparation

[0463] The Rene and Descartes libraries were synthesized by CustomArray. Both Rene and Descartes libraries were amplified using two round PCR. The PCR product was purified by PCR purification kit (Qiagen). The crRNA libraries of Descartes were cloned into the CLASH AAV plasmid by linearization with BbsI digestion and Gibson assembly. The Gibson assembly Descartes library products were transformed into high-efficiency competent cells (Endura) by electroporation. An estimated crRNA library coverage of ≥100× was observed after electroporation by colony counting. All the bacteria were harvested in pool and the plasmid library was purified using EndoFree Plasmid Maxi Kit (Qiagen). The representation of crRNAs in library plasmid was verified by NGS.

[0464] Packaging and Purification of AAV6

[0465] The Descartes library, empty vector, or individual gene targeting CLASH vectors were packaged by AAV6 serotype vectors to target human T cells. Briefly, AAV6 serotype plasmid, packing plasmid pDF6 and AAV6 transgene vector plasmid were added at a ratio of 1.7:2:1, and then polyethyleneimine was added and mixed well by vortex. The solution was left at room temperature for 10-20 minutes, then it was added dropwise onto HEK293FT cells at 80-90% confluency in 15-cm tissue culture dishes (Corning). Transfected cells were collected with PBS at 72 hours post-transfection. For AAV purification, transfected cells were mixed with pure chloroform (1:10 volume) and incubated at 37° C. with vigorous shaking for 1 hour. Pure NaCl was added to a final concentration of 1 M, then samples were centrifuged at 20,000 g at 4° C. for 15 minutes. The aqueous layer was transferred to another tube while the chloroform layer was discarded. PEG8000 was added to 10% (w/v), followed by vigorous shaking to dissolve, and the mixture was incubated at 4° C. for 1 hour. Samples were centrifuged at 20,000 g at 4° C. for 15 minutes. The supernatant was then discarded and the pellet resuspended with Dulbecco's phosphate-buffered saline (DPBS) with MgCl₂. The dissolved solution was treated with universal nuclease (Thermo Fisher), then incubated at 37° C. for 30 minutes. Chloroform was added (1:1 volume), followed by vortexing and centrifugation at 14,000 g at 4° C. for 15 minutes. The aqueous layer was dumped into a 100-kDa molecular cut-off filter (Millipore) and centrifuged at 3000 g to concentrate the virus. Virus was tittered by quantitative PCR using custom Taqman assays targeted to the U6 promoter.

[0466] Library Scale AAV Transduction

[0467] Human primary peripheral blood CD8⁺ T cells or human peripheral blood mononuclear cells (PBMC) were purchased from STEMCELL Technologies. The CD8⁺ T cells from PBMC were isolated using the human CD8+ T Cell isolation kit (Miltenyi Biotec) according to the manufacturer's protocol. T cells were cultured in X-VIVO media (Lonza) with 5% human AB serum and recombinant human IL-2 20 ng/mL. Electroporation was performed after T cells thawed for 2 days. Cells were prepared at a density of ˜2.5×10⁶ cells per 100 μL tip reaction in electroporation Buffer R (Neon Transfection System Kits). A total of 20 reactions were set for the Descartes library electroporation. For each reaction, T cells were mixed with 10 μg of modified NLS-LbCpf1mRNA (TriLink) and electric shocked at program 24 (1,600V, 10 ms and three pulses). After electroporation, the cells were transferred into 1 mL of pre-warmed X-VIVO media (with 5% human AB serum but without antibiotics) immediately. Indicated volumes of AAV6 at an estimated number of viral particles (vps) per cell (MOI=1×10³-10⁴ vp/c) were added into the T cells after electroporation for 2-4 hours. Due to the fact that there are empty/defective AAVs during packaging which make them non-infectious, the actual infectious vps are often lower, making functional infectivity lower than 1×10³-10⁴ vp/c. While it is possible that a T cell can have more than one AAV, a T cell only has two copies of genome, and therefore, the CLASH HDR knock-in design caps the crRNA integration so that each cell can have no more than 2 different integrated crRNAs. It was observed that 5 days post transduction the percentage of CAR-positive cells was 10.9%, yielding an effective multiplicity of infection (effective MOI) of 0.1096 in comparable screen terms.

[0468] Validation of Massively Parallel HDR Knock-In in Human T Cells

[0469] After electroporation for 5 days, the genomic DNA of massively parallel engineered T cell pools was extracted by using QIAamp DNA Blood Mini Kit (Qiagen). In-Out PCR was used to amplify out the integrated fragments from gDNA. The PCR product was purified by PCR purification kit (Qiagen) and sequenced by Keck Biotechnology Resource Laboratory (Yale).

[0470] Replicates

[0471] All experiments were done with at least two biological replicates. Experimental replicates are indicated in the corresponding description for each figure, as appropriate.

### Results

[0472] Currently, there is no approach for high-throughput CAR-T engineering due to various challenges. The CLASH system was therefore built based on the advantageous features of AAV as well as the Cas12a/Cpf1 gene editing system. Taking the advantage of AAV vectors, three components were encoded into the transgene: homology-directed repair (HDR) arms for targeted knock-in, CAR-expression cassette, and Cas12a/Cpf1 CRISPR RNA (crRNA) expression cassette for genetic manipulation (FIG. 1). While HDR can be used to target any place in the genome, the TRAC locus was first targeted for clinically-relevant CAR knock-in. The base of the CAR-expression cassette can be standardized so that all variants are directly comparable for their phenotypes, such as persistence. The crRNAs can be a single element, or can be readily engineered in a pooled manner by simple molecular cloning. Due to the advantages of transactivating RNA (tracrRNA)-independence, multiple crRNAs can be engineered to be expressed under the same polymerase III promoter. An AAV vector (CLASH AAV vector, CLASH vector for short) expressing three components was engineered: (1) an anti-CD22 CAR construct with CD22-scFv, a transmembrane domain (TM), and a signaling domain (4-1BB, CD3z) (CAR22 for short); (2) a constitutive crRNA targeting the 5′ end of the first exon of TRAC to facilitate knockin; and (3) a wildcard crRNA cassette separated from crTRAC by Cas12a/Cpf1 direct repeats (DR) to test virtually any number of crRNAs against any set of genes. All of these components were flanked by the 5′- and 3′-TRAC HDR arms so that they could be simultaneously knocked into the same position (FIG. 1). The CLASH AAV vector thereby provided three distinct functions in one setting: knock-in into the TRAC locus, CAR expression, and targeted mutagenesis.

[0473] To permit massively parallel CAR knock-in human primary T cells, a workflow for CLASH-mediated human CAR-T cell engineering was developed and optimized (FIG. 1). In this workflow, Cas12a/Cpf1 mRNA is first delivered into human primary CD8 T cells by electroporation, then transduced with an AAV6 encoding CLASH vector or library. To test CLASH's CAR generation efficiency, the on-target integration of CAR into T cells was measured by FACS at five days after transduction. By staining for CD3 which forms a surface complex with TCR, TRAC knockdown efficiency (CD3⁻) was determined to be >60%, with on-target integration of CAR22 (CD3⁻CAR22⁺) at 37.4% and 51% in donor 2 and donor 3 CD8 T cells, respectively.

[0474] In order to achieve massively parallel CAR-T engineering (CAR-T mass engineering) with immunologically relevant targets, two Cas12a/Cpf1 guide RNA libraries were designed to diversify the wildcard crRNA position with targeted mutagenesis. The first library, Descartes, contained 8,047 crRNAs, targeting 954 immune genes (see Table 2) with 8 crRNAs per gene for most genes, and 1000 non-targeting controls (NTCs) (FIG. 2A). The immune genes were chosen as a superset from gene sets implicated in T cell exhaustion (Wherry et al., 2007), epigenetic regulators (Arrowsmith et al., 2012), T cell co-stimulation, memory T cell differentiation, T cell receptor signaling pathway, adaptive immune response, immune response to tumor cell, T cell proliferation, and TET2 which is also an epigenetic regulator. Similarly, a smaller library, Rene, was also designed that contained 4,085 crRNAs targeting a more refined set of genes (Table 3). All crRNAs were scored for selection using Deep Cpf1 (Kim et al., 2018) to enhance potential gene editing efficiency and reduce potential off-target effects. These libraries were cloned into the CLASH AAV vector. The library compositions were verified by next-generation sequencing (NGS) using vector-specific primer readout.

[0475] To test (i) whether the entire CLASH construct was integrated into TRAC locus in the human T cell genome, and (ii) whether the scale of the knock-in was achieved for multiple constructs in the same pool of T cells, specific primers flanking the genomic regions outside the 5′- and 3′-HDR arm were used to amplify the genomic regions rather than the AAV donor, and sequence the inserted region. The Sanger sequencing results showed that, first, the designed knock-in regions were indeed in the genomic DNA; and second, there was clear sequence degeneracy in the crRNA wildcard region, indicating that diverse crRNAs exist in the targeted pool of human T cells. Sanger sequencing results of Descartes-Lib AAV plasmid and pooled Descartes-Lib CD22 CAR-T cell genomic DNA at TRAC locus showed degenerated at the library site in both Descartes-Lib AAV plasmid pool and Descartes-Lib CLASH knock-in genomic DNA pool, but not in either vector controls. With the successful pooled knock-in observed, this CLASH system thus provided a platform for high-throughput generation of defined genomic-integrated CARs in custom-defined library scale in human T cells.

### Example 2: CLASH Mediates High-Throughput Engineering of Pooled CAR-T Variants and Selection in Long-Term Co-Culture

### Materials and Methods

[0476] CLASH time-course dynamics of long-term CAR-T co-culture

[0477] T cells were infected with vector or Descartes AAV6 after electroporation with NLS-LbCpf1mRNA. After electroporation for 5 days, the percentage of positive CAR-T cells was determined by staining with CD3 and CAR specific antibodies. 2×10⁶ positive CAR-T cells per replicate were used with a minimal representation of 20× transduced cells per crRNA. T cells were co-cultured with NALM6 at low E:T (0.2:1) ratio. After clearance of NALM6, new rounds of stimulation were performed until vector CAR-T cells were exhausted. After each round of stimulation, the T cells were harvested and frozen in liquid nitrogen. Genomic DNA (gDNA) was isolated by DNA purification kit (Qiagen).

[0478] CLASH CAR-T Coculture Time-Course Readout

[0479] After each round of stimulation, the T cell genomic DNA (gDNA) was isolated by DNA purification kit (Qiagen). The crRNA library readout was performed using a two-step PCR strategy, where the first In-Out PCR was used to amplify out the integrated fragments from gDNA and the second PCR adds appropriate sequencing adapters to the products from the first PCR. For the first round PCR, the thermocycling parameters were 98° C. for 1 min, 20 cycles of (98° C. for Is, 60° C. for 5 s, 72° C. for 25 s), and 72° C. for 2 min. In each PCR reaction, 2 μg of total gDNA was used for in vitro and 5 ul DNA extraction solution was used for in vivo. A total of 3-4 reactions was used to capture the full representation of the library. PCR products for each biological sample were pooled and used for amplification with barcoded second PCR primers. For the second round PCR, the thermocycling parameters were 98° C. for 1 min, 28 cycles of (98° C. for Is, 61° C. for 5 s, 72° C. for 10 s), and 72° C. for 2 min. Second PCR products were pooled and then normalized for each biological sample before combining uniquely barcoded separate biological samples. The pooled product was then gel purified from a 2% E-gel EX (Life Technologies) using the QIAquick Gel Extraction Kit (Qiagen). The purified pooled library was then sequenced with HiSeq or NovaSeq systems (Illumina).

[0480] Flow Cytometry

[0481] All antibodies for flow cytometry were purchased from Biolegend. All flow antibodies were used at 1:200 dilutions for staining unless otherwise noted. For surface staining, cells were stained with surface marker antibodies in the staining buffer of 2% FBS in PBS on ice for 30 min. Samples were washed twice with 2% FBS in PBS before analysis. For CAR staining, the CD22BBz CAR transduced T cells were incubated with 0.2 ug CD22-Fc (R&D system) in 100 uL staining buffer for 30 mins, and then stained with PE-IgG-Fc (Biolegend). For intracellular cytokine staining analysis, CAR⁺ T cells and NALM6 were plated at 1:1 E:T ratio in 96-well plate (Corning) and 0.2 μl per test Brefeldin A Solution (1000×, Clone BFA, BioLegend) for 5 h. After incubation, intracellular cytokine staining was performed using the BD Cytofix/Cytoperm™ Fixation/Permeabilization Solution Kit (BD) according to the manufacturer's instruction using the following antibodies from BioLegend: PerCP/Cyanine5.5 anti-human/mouse Granzyme B (clone QA16A02), FITC anti-human TNFα [clone MAb 11], APC anti-human IFNγ (clone B27).

[0482] Standard Statistical Analysis

[0483] All statistical methods are described in the corresponding description of the figure. The P values and statistical significance were estimated for all analyses. The unpaired, two-sided, Mann-Whitney test was used to compare two groups. One-way ANOVA, two-way ANOVA, Dunnett's multiple comparisons test, Tukey's multiple comparisons test was used to compare multiple groups. Data between two groups were analyzed using a two-tailed unpaired t-test. Multiple t-test using the Holm-Sidak method was used for multiple group comparison. Different levels of statistical significance were accessed based on specific p values and type I error cutoffs (0.05, 0.01, 0.001, 0.0001). Data analysis was performed using GraphPad Prism v.8. and RStudio.

### Results

[0484] CAR-T cell therapy is limited by poor T cell expansion and persistence, especially under chronic exposure to viral or tumor antigens that can result in T cell dysfunction (Savoldo B., et al., Clin Invest., 121(5):1822-6 (2011); Shin H., and Wherry E J., Curr Opin Immunol., 19:408-415 (2007)). Thus, the CLASH system was used to rapidly identify more persistent forms of CAR-T. In a small-scale experiment, it was observed that repeated co-culture of CAR-T cells with antigen-specific tumor cells at lower effector:tumor (E:T) ratio significantly promoted T cell differentiation with decreased T central memory cells population (CD45RO⁺CD62L⁺) and decreased capacity to express IFNγ and TNFα with continuous exposure, after each round of co-culture. An in vitro long-term culture system was designed to identify genes whose perturbation can increase the longevity and cytotoxicity of CAR-T cells with chronic antigen exposure (FIG. 2B). With the pipeline established above, AAV-CLASH Descartes-Lib was used to rapidly generate pools of TRAC knock-in human CAR-T variants. The empty CLASH vector was used to generate control knock-in CAR-T cells that would otherwise be identical but without additional mutagenesis. After transduction with vector or Descartes-Lib AAV6, the control or pool mutant CAR-T cells were repeatedly co-incubated with NALM6 cells at E:T ratios of 0.2 for 54 days, and a fraction of them were collected at each round for genomic DNA prep and deep sequencing. The long-term culture was performed with three independent series, so that each CLASH Descartes CAR-T pool had a matched time-series.

[0485] Initially (at day 0), the vector and Descartes-Lib transduced CAR-T cell pools showed similar immune phenotypes. During tissue culture, dynamic alterations of the cancer cell to CAR-T cell ratios after multiple rounds of co-culture were observed, indicative of selection within the pools (FIG. 2B). After the last round of stimulation at day 54, vector CAR-T lost killing ability, with 90.6% NALM6 cells (CD8⁻CAR22⁻) remaining, whereas Descartes-Lib CAR-T cells had drastically more efficient tumor cell clearance compared with vector CAR-T cells, where only 2.7% NALM6 cells (CD8⁻CAR22⁻) remained. The percentages of central memory CAR-T cells in vector and Descartes-Lib CAR-T cells were not different prior to stimulation. However, the Descartes library significantly prevented T cell terminal differentiation at day 54 as indicated by the significantly increased CD45RO⁺CCR7⁺ cell population in the pool (FIG. 2C). To investigate whether Descartes-Lib pool CAR-T cells maintain cytotoxicity after long term co-culture, intracellular IFNγ and TNFα were measured by FACS after re-stimulation with specific antigen for 5 hours. Compared to vector CAR-Ts, the Descartes-Lib CAR-T cell pools showed higher levels of IFNγ at the endpoint (d54), but not TNFα (FIGS. 2D-2E). The Descartes-Lib CAR-T cell pools showed reduced T cell exhaustion with diminished surface levels of PD-1 and LAG3, but no change in TIGIT (FIGS. 2F-2H). The observation in the differences between pool mutant vs. wildtype CAR control at the gross population level indicated that at least subsets of mutant variants in the Descartes-Lib pool were contributing to the shifts of various phenotypes of these CAR-T cells.

[0486] Identification and Validation of Candidate CAR-T Variants in Long-Term Co-Culture

[0487] To determine the actual composition and dynamics of the variants, the library readout method was optimized and NGS was performed on all the experimental replicates at all collection time points during the entire time course of CAR-T: cancer cell co-culture, which determined the crRNA representation in the Descartes library across all samples. Correlation analysis of the crRNA representations in the genomic readouts of Descartes-Lib CLASH knock-in CAR-T pool was performed. Pearson correlations of crRNA library representation across time points were calculated based on log 2 rpm values. It was observed that the crRNA representation for samples collected at each time point naturally clustered and were more correlated with each other than with samples at other time points, suggesting a high degree of consistency. The crRNA representation of corresponding samples along the time points were also more similar to the matched samples at other timepoints than the other two non-matching samples, displaying a tile pattern in the correlation heatmap, showing the consistency of matched samples along the time course trajectory, and thereby demonstrating high level of technical reproducibility. In all three replicates, the diversity of the library reduced over time and the CAR-T library pool became increasingly dominated by a smaller fraction of crRNAs over time, as shown in the cumulative distribution function (CDF) plot, indicative of a time gradient in this process.

### Example 3: Identification and Validation of Genes Whose Loss of Function Enhance Persistence of CAR-T Variants

### Materials and Methods

[0488] Primary and Dynamic Time-Course of Cas12a/Cpf1 crRNA Library Representation Analysis

[0489] Raw read counts from each sample was converted to reads per million (rpm), then log 2 transformed for certain analyses. Pearson correlations for heatmaps were calculated using the cor function in R, and empirical cumulative distribution function was computed and plotted using stat_ecdf from ggplot. RIGER and false-discovery rate (FDR) based criteria were used to determine top candidate genes. For RIGER analysis of CRISPR screens, read count tables were used to calculate log fold changes for T cell samples collected from each day vs day 0 samples to score and rank sgRNAs, with ties in rank broken by random order. These data were then used as input to a Java-based implementation of RIGER (github.com/broadinstitute/rigerj) to generate P values and gene rankings based on consistent enrichment across multiple sgRNAs for identification of candidate genes (Shalem O., et al., Science, 343:84-87 (2014)). Both the second highest-ranking sgRNA and the weighted sum scoring methods were used for computation of gene rankings. For FDR based analysis, a crRNA was determined to be statistically significant if it was enriched using a false-discovery rate (FDR) threshold of 1.0% or 5.0% based on the abundances of all non-targeting controls. Both primary and dynamic time-course crRNA representation analyses were performed across multiple different in vitro and in vivo screening readouts. Custom R scripts were used, including for Venn diagrams and other visualizations, heatmaps, and statistical analyses

[0490] Generation of CD22 CAR-T with Individual Gene Perturbation

[0491] The individual crRNAs were cloned into the CLASH vector plasmid by linearization with BbsI digestion and quick ligation kit (NEB). The ligated products were transformed into Stb13 competent cells by heat shock at 42° C. for 90 s. A single clone was picked and the plasmid was isolated by mini prep kit (Qiagen). The plasmid sequence was confirmed by Keck Biotechnology Resource Laboratory (Yale).

[0492] T7E1 Assay

[0493] Five days after electroporation and AAV transduction, positive CAR-T cells were stained and sorted by BD FACSAria II. The genomic DNA was extracted using QIAamp DNA Blood Mini Kit (Qiagen). PCR amplification of the genomic regions flanking the crRNAs was performed using the appropriate primers. Using Phusion Flash High Fidelity Master Mix (Thermo Fisher), the thermocycling parameters for PCR were 98° C. for 2 min, 35 cycles of (98° C. for 1 s, 60° C. for 5 s, 72° C. for 15 s) and 72° C. for 2 min. The PCR amplicons were then used for T7E1 assays according to the manufacturer's protocol. Statistical significance was assessed by two-sided unpaired Welch's t-test.

[0494] Nextera Library Prep and Amplicon Sequencing

[0495] The PCR products described from the T7E 1 experiments were used for Nextera library preparation following the manufacturer's protocols (Nextera XT DNA Library Preparation Kit, Illumina). Briefly, 1 ng of purified PCR product was fragmented and tagged using the Nextera Amplicon Tagment Mix according the to manufacturer's recommendations, followed by limited-cycle PCR with indexing primers and Illumina adaptors. After this amplification, DNA was purified and sequenced using 100-bp paired-end reads on an Illumina HiSeq 4000, Novaseq or equivalent. For indel quantification, reads were mapped to expected amplicon sequences using BWA-MEM with the −M option. 100 bp reads from the SAM file that fully mapped within a +/−75 bp window of expected cut site within the amplicon were then identified (soft-clipped reads discarded). Indel reads were then identified by the presence of “I” or “D” characters within the CIGAR string. Cutting efficiency was quantified as percentage of indels over total (indel plus wild-type) reads within the defined window.

[0496] CLASH CAR-T crRNA Screen Processing

[0497] Raw single-end fastq read files were filtered and demultiplexed using Cutadapt. Reads were demultiplexed for the barcodes included in the forward readout PCR primers. To identify and remove extra sequences immediately upstream of the crRNAs, the following settings were used: cutadapt -g TAATITCTACTAAGTGTAGAT (SEQ ID NO:12,136) -e 0.1-m 19--discard-untrimmed. The 20 bp crRNA sequences were then mapped the designed Descartes library sequences using a bowtie index generated using the bowtie-build command in Bowtie 1.2.2. Mapping used the following settings: bowtie -v 1 -m 1, and the number of reads that had mapped to each crRNA within the library was quantified. This processing was used across multiple different in vitro and in vivo CLASH crRNA library readouts, as well as for the MIPs crRNA representation readout.

[0498] CLASH Time-Course of In Vivo CAR-T Representation in a Cancer Model

[0499] NOD.Cg-Prkdcscid Il2rgtm1Wjl/SzJ (NSG) mice were purchased from the Jackson Laboratory and bred inhouse. NSG mice between 6-8 weeks old were used and inoculated with 5×10⁵ NALM6-GL cells intravenously. Mice were randomly assigned to different groups prior to treatment. 2×10⁶ vector CAR-T cells or Descartes CAR-T cells were infused back to mice after 3 days. NSG mice was euthanized at days 7, 11 and 14. Spleen and bone marrow were collected immediately. Red blood cells were lysed by incubation with ACK (Ammonium-Chloride-Potassium) Lysis Buffer (Thermo Fisher) for 2 mins. After washing, the cell surface markers were labeled as described for FACS and assessed by BD FACSAria II. CAR positive T cells were sorted and the genomic DNA was extracted using QuickExtract DNA extraction solution (Lucigen).

[0500] MIPs Library Selection and Cloning

[0501] The MIPs library contains 56 crRNAs, targeting 7 top hit genes from the validation, with approximately 8 crRNAs per gene. The 56 crRNAs were selected from the Descartes library. To generate the MIPs AAV vector, the pre-mixed crRNAs were cloned into the PXD60 plasmid by linearization with BbsI digestion and quick ligation. The MIPs library products were transformed into high-efficiency competent cells (Endura) by electroporation. An estimated crRNA library coverage of >300× (16,800 colonies) was observed after electroporation by colony counting. All the bacteria were harvested in pool. Plasmid library was purified using EndoFree Plasmid Maxi Kit (Qiagen). The representation of crRNAs in library plasmid was verified by NGS. MIPs library transduction was performed similarly to the library scale AAV transduction. Three reactions were set for the MIPs library electroporation.

[0502] MIPS Probe Design

[0503] MIPS probes were designed according to previously published protocols (website: github.com/shendurelab/MIPGEN), then processed by a customized selection algorithm. 107 MIPs probe were designed using MIPgen. Briefly, the 77 bp flanking the predicted cut site of each crRNA of all 56 unique crRNA were chosen as targeting regions, and the bed file with these coordinates was used as an input. These coordinates contained overlapping regions, which were subsequently merged into 31 unique regions. Each probe contains an extension probe sequence, a ligation probe sequence, and a 6-bp degenerate barcode (NNNNNN) for PCR duplicate removal. A total of 107 MIP probes were designed (SEQ ID NOs:12,139-12,245), covering a total amplicon of 5,675 bp. The statistics for the MIP target size were as follows: minimum, 154 bp; maximum, 331 bp; mean, 183 bp; median, 163 bp. Each of the MIPs was synthesized using standard oligo synthesis (IDT), normalized, and pooled.

[0504] MIPS Target-Capture Sequencing

[0505] After 10 days of electroporation, CAR positive cells from the MIPS library and control group were sorted by FACS (BD), then CAR-T cells genomic DNA was isolated by DNA purification kit (Qiagen). The experimental workflow was done following standard protocols. In brief, 50 -100 ng of high quality, non-fragmented genomic DNA was used for hybridization. After gap filling and ligation, circularized DNA molecules were used as template in PCR with universal primers complementary to the linker sequence. Then, sample-specific barcode sequences and Illumina adaptors were introduced during the PCR amplification step. After this amplification, DNA was purified and sequenced using 100-bp paired-end reads on an Illumina HiSeq 4000, Novaseq or equivalent.

[0506] MIPS Data Analysis

[0507] For MIPS library crRNA representation in plasmid and samples, standard screen processing and mapping was performed as described above using a subset library with the MIPs crRNAs. For mutation-based MIPs target-capture sequencing analyses, raw pair-end fastq read files were first mapped to the reference hg38 Homo sapiens genome assembly and sorted using BWA and SAMTools. For coarse filtering, reads near target crRNA regions were selected (+/−1000 bp) using BEDTools and then indexed and used for variant calling using SAMTools and Varscan v2.4.1. with the parameters pileup2indel --min-coverage 1 --min-reads2 1 --min-var-freq 0.001 --p-value 0.05. Generated VCF files were then used for fine mapping to crRNA cutting regions.

[0508] To define cutting regions, crRNAs were first collapsed based on whether their cutting sites were contiguous within or equal to 16 bp. For mapping, crRNA cutting regions were defined as +/−8 bp from max/min of cutting sites for collapsed crRNAs (non-collapsed crRNAs will therefore have 16 bp windows, but collapsed crRNAs will be larger). For insertions, the variant position point in genome was kept as defined by VCF output. For deletions, the variant position point in genome was adjusted to reflect the center point of the deletion. Variants were mapped to crRNA cutting regions based on the above. Further downstream analyses including those comparing cutting efficiency with crRNA representation were based on collapsed crRNA references. For MIPs crRNA representation in the library and associated cutting efficiency bar plots, crRNAs with near 0 reads in library sequencing (PRDM-cr6 and PRDM-cr7 for MIP1, PRDM-cr1 for MIP3) were removed for visualization—but were included in all other analyses and statistical tests. For analyses including MIPs cutting efficiency normalized by library representation, mean summed variant frequencies for each target region were divided by a normalization factor defined as: (mean library reads)/median (mean library reads). Statistical tests and visualizations were performed using custom R scripts.

### Results

[0509] A series of analyses was performed to identify which variants of the CAR-Ts in the Descartes pool are more persistent and potentially have enhanced effector function. From an overall time-course heatmap of all crRNAs, it was observed that the majority of crRNAs diminished over time, and that most of the crRNAs became depleted by day 32. However, distinct sets of crRNAs emerged as persistent clusters at varying degrees. To identify enriched hits, examination of the time course at a late time point (e.g., d32) and a terminal time point (d54) for individual crRNAs and individual genes was performed. A fraction of the crRNAs were highly enriched at day 32 at a false-discovery rate (FDR) of 1.0%, and fewer crRNAs were enriched at day 54. Comparison of day 32 or day 54 crRNA abundance to the ground zero baseline (day 0) revealed rapidly decaying distributions of persistent crRNAs, with a small number of enriched crRNAs over baseline (FIGS. 3A-3B). Examples of these crRNAs showed varying degrees of persistence up to various time points. Representative highly enriched crRNAs target several potential candidate genes such as PRDM1/BUMP-1, DPF3, SLAMF1, TET2, HFE/HLA-H, and PEL11. RIGER analysis also revealed a number of similar high-ranked candidate genes including PRDM1, DPF3, SLAMF1, HFE, and PEL11.

[0510] To examine the behaviors of individual crRNAs targeting the same gene across three replicates over time, crRNAs were internally compared against each other and externally to the putatively neutral behavior, the mean and 99% confidence interval (CI) of the 1,000 NTCs, and were visualized on the same plot for each gene. Certain known T cell exhaustion surface markers (PDCD1, HAVCR2/TIM3), transcription regulators previously implicated in T cell function (TET2, NR4A2), and under-characterized candidates identified from the analyses of the time-course (PRDM1, DPF3, PEL11 and LAIR1) were examined. While the NTC mean had a median decay of 20 days, distinct crRNAs, representing distinct CAR-T variants were observed to persist at a higher level at d20 or later time points (d32, d41 or d54). TET2 has been previously identified as a key factor suppressing CAR-T expansion and persistence in vivo (Fraietta J A, et al., Nature, 558:307-312 (2018). One TET2 mutant CAR-T variant, as well as multiple mutant variants of NR4A2, PRDM1, DPF3, PEL11 and LAIR1 showed enhanced persistence as compared to NTC CAR-Ts.

[0511] Based on their time course dynamics, the following seven candidate genes previously not documented in CAR-T function, were further investigated: DPF3, HFE/HLA-H, LAIR1/CD305, USB1, PEL11, PRDM1/BLIMP-1 and SLAMF1/CD150. To test whether these genetic variants of CAR-T cells have enhanced anti-tumor phenotypes, individual CAR-T variants were first re-generated using single AAV-CLASH vectors encoding CAR22 and top-rank crRNAs targeting each of these genes. Next the cutting efficiency was measured by T7E1 endonuclease assay, and then by NGS, finding that all genes except LAIR1 showed high efficiency gene editing (DPF3, HFE, USB1, PEL11, PRDM1 and SLAMF1 achieved greater than 80% indels) where most of them were out-of-frame. The memory cell population was measured by flow cytometry, and it was observed that the central memory T cell population was increased in DPF3, LAIR1, PEL11, PRDM1 and SLAMF1 mutant CAR-Ts as compared to vector control CAR-T (FIGS. 3C-3E). Quantification of intracellular IFNγ and TNFα levels showed that DPF3, HFE and USB1 edited CAR-T cells have higher levels of IFNγ and TNFα after stimulation with NALM6 for 5 hours (FIGS. 3F-3K). PELI1 mutants exhibited lower levels of both IFNγ and TNFα; PRDM1 and LAIR1 mutants exhibited lower levels of IFNγ but not TNFα. SLAMF1 mutant exhibited moderate to little change in the levels of IFNγ and TNFα relative to the vector (FIGS. 3F-3K).

[0512] In order to determine whether the ability of gene editing by crRNAs correlated with their screen performance in the CLASH experiment, a CLASH-MIPS (Molecular Inversion Probe Sequencing) experiment was performed in T cells. In this experiment, the crRNA abundance was measured by genome-integrated crRNA library readout, and the actual gene editing efficiency of individual crRNAs was measure by MIPS using biological triplicates. The results were then compared with the crRNAs' screen performance in the CLASH experiment. A minipool of 56 crRNAs targeting 7 top candidate genes was designed as above and cloned into the CLASH vector and CLASHed human CD8 T cells (by mRNA electroporation and AAV6 transduction as above), to generate a CAR-T minipool. The size of the minipool was determined considering (1) the sensitivity of MIPS to measure genomic variants; (2) the ability of MIPS to capture actual genome editing events in each of the specific crRNA target sites, with dilution of editing events in a pooled manner; and (3) the relative gene editing challenges in T cells. Library readout successfully mapped the crRNA abundance of the minipool. The ability of individual crRNAs' gene editing (measured by MIPS) was compared to their screen performance in the CLASH-Descartes experiment using the d32 data, as a balanced timepoint when a substantial time period has elapsed for selection but not to a stage when the majority of crRNAs are lost (e.g., d54). While the different crRNA sets of individual genes showed varying strengths of correlation between gene editing efficiency in a pooled manner (MIPS) and screen performance (CLASH), considering all genes/all crRNAs measured, the overall gene editing efficiency (MIPS) significantly correlated with mean screen performance (CLASH). This significant correlation also holds regardless of whether the gene editing efficiency is normalized by crRNA abundance or not. These data indicate that the screen performance of crRNAs significantly correlates with their capacity for gene editing in T cells, and, together with the fact that the majority of the crRNAs tested individually showed high gene editing efficiency, the crRNAs enriched in the screen largely represent true cutters and screen performers for the top candidate genes.

[0513] CLASH-Mediated Human CAR-T Variant In Vivo Selection in a Cancer Model

[0514] To further identify which CAR-T variants have better anti-tumor phenotypes, a time-course in vivo CLASH-Descartes experiment was performed to identify genetic perturbations that can increase CAR-T persistence in a leukemia mouse model. Leukemia induction was performed by transplanting NALM6-GL cells into NSG mice. Three days post induction, Descartes-Lib CAR-T variants were infused into mice by adoptive transfer. Bone marrow and spleen samples were collected at day 7, day 11, and day 14. A higher CAR-T: cancer cell ratio in recipients of Descartes-Lib CAR-T cells was observed at day 14 after CAR-T infusion (FIG. 3L). The crRNA library representation of the Descartes library in these in vivo samples was then readout and the deep sequencing data was analyzed to identify enriched crRNAs in day 14 in vivo samples compared to the pre-injection day 0 CAR-T cell pool. A fraction of crRNAs were observed to be highly enriched in day 14 in vivo samples at FDR 1.0%, for example TNFRSF21, TBX21, SIRT7, GPR65, PRDM1 and PRDM4. The results from in vivo CLASH were then compared to the in vitro long-term co-culture CLASH experiment, using enriched gene sets from independent time points from both in vitro and in vivo. Substantial overlap of enriched genes between in vitro day 32, in vitro day 54, in vivo day 7, in vivo day 11, and in vivo day 14 (FIG. 3M). Eight genes were significantly enriched across all these five gene sets at an FDR of 5%, including LAMP3, FCRL4, MYH10, GATA3, ENTPD1, PRMT1, BTN1A1 and PRDM1 (FIG. 3M).

### Example 4: PRDM1 Mutant CAR-T Cells Exhibit Increased Memory Cell Population, Stronger Antigen-Stimulated Proliferation, and Maintained Cytotoxicity

### Materials and Methods

[0515] CAR-T Purification

[0516] CAR positive T cells were purified by streptavidin microbeads (Miltenyi Biotec). Briefly, 1×10⁷ cells were suspended in 100 μL labeling buffer, and then incubated with 1 μg Pierce™ Recombinant Biotinylated Protein L (Thermo Fisher) and 10 μl FcR Blocking Reagent (Miltenyi Biotec) for 15 minutes at 4° C. Cells were washed to remove unbound protein and labeled with 10 μL streptavidin microbeads for 15 minutes on ice. After wash, the suspension was loaded onto MACS column for separation according to manufacturer's protocol (Miltenyi Biotec).

[0517] Kill Assay (Co-Culture)

[0518] GFP and firefly luciferase genes were stably transduced into the NALM6 cell line using a lentivirus. 2×10⁴ NALM6-GL cells were seeded in a 96 well plate. The engineered CAR-T, vector CAR-T, or normal CD8 T cells were co-cultured with NALM6-GL at indicated E:T ratios for 24 hours. To test the luciferase expression in NALM6-GL, 150 μg/ml D-Luciferin (PerkinElmer) was added into each well. After 10 minutes, luciferase intensity was measured by a plate reader (PerkinElmer). Direct tumor cell killing was quantified by luminescence. Luminescence units were normalized to control (NALM6-GL without any effector cells, LUC). The calculation formula is: % Cytotoxity=100−LU^{sample}/LU×100.

[0519] Western Blot

[0520] Cells were lysed by ice-cold RIPA buffer (Boston BioProducts) containing protease inhibitors (Roche, Sigma) and incubated on ice for 30 minutes. Protein supernatant was collected after centrifuging at 13,000 g at 4° C. for 30 minutes. Protein concentration was determined using the BCA Protein Assay Kit (Thermo Fisher). Protein samples were separated under reducing conditions on 4-20% Tris-HCl gels (Bio-Rad) and analyzed by western blotting using primary antibodies PRDM1/Blimp-1mouse mAb (R&D 1:1000) followed by secondary anti-mouse HRP antibodies (Sigma-Aldrich, 1:10,000). Blots were imaged with an Amersham Imager 600.

[0521] Immunoprecipitation

[0522] PRDM1 deficient CD22 CAR-T cells or vector cells were lysed by ice-cold RIPA buffer with protease inhibitor cocktail (Roche) for 30 minutes. Immobilized BLIMP1/PRDM1 Antibody (CST) was added on the NHS-activated agarose beads according to manufacturer's protocol (Thermo Fisher). Cell lysates were incubated with beads at 4° C. and rotated for 1 hour. The supernatant was discarded after spin down for 1 minute at 3,000 RPM. Beads were washed 4 times with ice-cold TBS and boiled for 10 minutes with SDS loading buffer. Protein samples were loaded on 4-20% Tris-HCl gels (Bio-Rad).

[0523] In-Gel Digestion and Mass Spectrometry

[0524] Protein-containing gel slices were digested with trypsin overnight. The resulting peptide mixtures were extracted from the gel and run directly on an Orbitrap Velos instrument (Thermo Fisher Scientific) with 120-min liquid chromatography (Buffer A: 0.1% formic acid water; Buffer B: 0.1% formic acid MeCN; Gradient: 0% to 95% buffer B; flow rate: 0.1 μl/min) and tandem mass spectrometry (LC-MS/MS) using a standard TOP20 method procedure. Briefly, MS1 m/z regions for 395-1,600 m/z ions were collected at 60 K resolving power and used to trigger MS/MS in the ion trap for the top 20 most abundant ions. Active dynamic exclusion of 500 ions for 90 s was used during the LC-MS/MS method. Peptides were eluted with 300 nl/min flow rate using a NanoAcquity pump (Waters). Samples were trapped for 15 min with a flow rate of 2 μl/min on a trapping column 100-micron ID packed for 5 cm in-house with 5 μm Magic C18 AQ beads (Waters) and eluted with a gradient to 20 cm 75-micron ID analytical column (New Objective) packed in-house with 3 μm Magic C18 AQ beads (Waters).

[0525] Mass spectra were analyzed using Scaffold Q+/Q+S Version 4.0 against Uniprot database. A mass deviation of 20 ppm was set for MS1 peaks, and 0.6 Da was set as maximum allowed MS/MS peaks with a maximum of two missed. Maximum false discovery rates (FDR) were set to 0.01 both on peptide and protein levels. Minimum required peptide length was five amino acids.

[0526] CLASH-PRDM1 Genome-Wide AAV Integration Library Preparation

[0527] In order to perform genome-wide profiling of the CLASH-PRDM1 off-target integration events, a method modified from GUIDE-Seq (Tsai, S Q. et al., Nat Biotechnol., 33:187-197 (2015)) was developed. Briefly, CAR-T cells' genomic DNA (gDNA) was extracted after AAV transduction for 9 days. The adapter was made by annealing the Miseq common oligo with the sample barcode oligo (A01-A06) in TE buffer. The annealing program was set from 95° C. for 1 s; slow ramp down (approximately −2° C./min) to 4° C. The gDNA was fragmentated to ˜1,500 bp by using S220 focused-ultrasonicator (Covaris). End-repair and dA-tailing was performed by using NEBNext® Ultra™ End Repair/dA-Tailing Module (NEB) according to manufacturer's protocol. The repaired DNA was ligated with annealed adaptor by using T4 DNA ligase at room temperature for 1 hour. The sample was cleaned by using 0.9×SPRI (Beckman). The genome-wide off-target integration library was performed using a two-step PCR strategy with streptavidin beads purification, where the first PCR was used to bait-prey the fragments with integrated CAR gene from gDNA using biotinylated primer and the biotinylated fragments were purified by using streptavidin beads (Thermo). Next, second PCR added appropriate sequencing barcodes to the products from the first PCR. The Q5 was used for PCR (NEB). The thermocycling parameters for the two-round PCR were 98° C. for 30 s; 7 cycles of 98° C. for 10 s, 70° C. (−1° C./cycle), 72° C. for 1 min; 13 cycles of 98° C. for 10 s, 63° C. for 30 s, 72° C. for 1 min; 72° C. for 1 min, and hold at 4° C. PCR products for each biological sample were normalized and pooled. DNA less than 1 kb was selected. The sample was sequenced by using custom sequencing primers with Miseq (2×300 bp pair-end).

[0528] CLASH-PRDM1 Genome-Wide AAV Integration Data Analysis

[0529] Paired-end reads were processed using Cutadapt 3.2, BWA 0.7.17, and SAMtools 1.12 to identify off-target integration events. R2 reads containing TRAC elements were first trimmed and selected using cutadapt -GGTITACTCGATATAAGGCCTTGA (SEQ ID NO:12,137) -e 0.2 -m 20 --discard-untrimmed. Then, R2 reads containing ITR reads were trimmed and selected using cutadapt -GAAAGGTCGCCCGACGCCCGG (SEQ ID NO:12,138) -e 0.2 -m 20 -O 15 --discard-untrimmed. The ITR trimmed reads were then mapped to the Homo sapiens genome assembly GRCh38 (hg38) using BWA. In order to see where mapped reads target the genome without double counting at positions, reads were converted to single base pair coordinates using the starting positions and then converted to bedGraph format. Reads were normalized for sequencing depth using the R2 reads containing TRAC elements. Visualizations were generated using Integrative Genomics Viewer 2.9.2 and R packages including GenomicAlignments and ggbio.

[0530] TRAC Integration PCR

[0531] The gDNA was extracted after CLASH-Vector AAV transduction for 9 days. Using Phusion Flash High Fidelity Master Mix (Thermo Fisher), the thermocycling parameters for PCR were 98° C. for 2 min, 35 cycles of (98° C. for 1 s, 60° C. for 5 s, 72° C. for 1 min) and 72° C. for 2 min. The DNA was purified and sequenced by Sanger sequencing.

### Results

[0532] Based on the strong persistence dynamics in both the time-course co-culture and cancer model scored by multiple independent crRNAs, the PRDM1 variant represented a promising candidate for CAR-T engineering. PRDM1 was previously identified as a master regulator of normal CD8 T cells (Rutishauser et al., Immunity, 31:296-308. (2009)). It was hypothesized that PRDM1 editing may have enhanced potential for promoting CAR-T cells' anti-tumor immunity. To further investigate whether targeting of PRDM1 can improve CAR-T cell persistence and other anti-tumor effects, a series of experiments were performed. First, the cutting efficiency of multiple PRDM1 crRNAs was measured individually in donor 2 anti-CD22 CAR-T cells (CD22 CARs) by T7E1 endonuclease assay and NGS. Most of the PRDM1 crRNAs exhibited high efficiency gene editing (6/8 over 80%; 7/8 over 78%; only 1/8 below 50%—PRDM1-cr7 at 47%). Next, PRDM1-cr1 cutting efficiency in another healthy donor was tested along with another form of PRDM1 mutant CAR-T cells (anti-CD19 CAR-T cells/CD19 CARs).

[0533] The top two crRNAs scoring at high abundance at late-stage time points in the co-culture dynamics were chosen to further examine how the PRDM1 crRNAs affect the functional gene products (mRNA and protein) in CAR-T cells. These two PRDM1 crRNAs target different domains of PRDM1 protein. PRDM1 protein has three different isoforms produced by alternative splicing (UniProtKB—O75626; FIG. 4A). To investigate whether these two PRDM1 crRNAs can disrupt PRDM1 mRNA expression, three different probes specific to the mRNA transcripts that potentially encodes these isoforms were designed (Probe ISO1 targeting 5 prime region of isoform1, ISO2 targeting PRDM1-cr1 cutting site within the SET/PR domain, and ISO3 targeting PRDM1-cr2 cutting site within the zinc finger domain of PRDM1). It was observed that disruption of PRDM1 gene led to sharp increase of PRDM1 mRNA transcript as detected by ISO1 probe. This phenomena is consistent with previous studies where PRDM1 is autoregulated by itself via a strong feedback mechanism (Magnúsdóttir E., et al., Proc Natl Acad Sci USA., 104(38):14988-93 (2007); Martins G., and Calame K. Annu Rev Immunol., 26:133-169 (2008)). However, the PRDM1 mRNA could not be detected by the ISO2 probe in PRDM1-cr1 CAR-T cells, or by the ISO3 probe in PRDM1-cr2 CAR-T cells.

[0534] To further investigate this mechanism, the PRDM1 protein expression was further tested in anti-CD22 CAR-T cells generated from different donors. Two different AAV-CLASH vectors targeting different domains of PRDM1 were generated, with the top two crRNAs scored at high abundance at late-stage time points in the co-culture dynamics. These CLASH vectors were used to transduce human primary CD8 T cells to generate two forms of PRDM1 mutant anti-CD22 CAR-T cells (PRDM1-cr1 and PRDM1-cr2), along with one form of anti-CD19 CAR-T cells (PRDM1-cr1 only) (FIG. 4A). Both crRNAs generated high-efficiency PRDM1 gene editing at the target sites when examined 5 days post-transduction on different donors (FIG. 4B-4D). To further examine how the PRDM1 crRNAs affect the functional gene products (protein and mRNA) in CAR-T cells, PRDM1 protein expression in CAR22 T cells generated from different donors was tested. It was observed that PRDM1-cr2 led to strong reduction of the PRDM1 protein, yet interestingly, PRDM1-cr1 led to a production of a smaller sized protein recognized by the same PRDM1-specific antibody. To investigate the sequence of this reduced-size protein, immunoprecipitation was performed using anti-PRDM1 antibody and peptide identification by mass spectrometry (IP-MS). IP-MS results showed that the peptides near the PRDM1-cr1 cutting sites cannot be detected in PRDM1-cr1 targeted PRDM1 mutant CAR-T cells, as compared with vector control CAR-T cells, in all three replicates. Thus, PRDM1-cr1 generated a new mutant variant that is neither isoform2 nor isoform3.

[0535] Because specific protein domains targeted by CRISPR mediated gene editing with different guide RNAs can result in different functional mutants, it is often important to reveal the specific mutations in functional domains. To determine the nature of the mutant variant of PRDM1 gene product produced by PRDM1-cr1, two primers near the PRDM1-cr1 cutting site were designed and RT-PCR was used to identify the cDNA. Interestingly, two bands presented in PRDM1-cr1 group. The top band represents a mixture of wildtype and similar size gene products with small indels (reflected by the “noise” peaks), consistent with the Nextera-NGS results. Moreover, there was a 120 bp in-frame deletion in the lower DNA fragment which precisely corresponded to PRDM1 exon3. Gene editing induced exon-skipping has been observed in Kras and Ctnnb1 in mouse cell lines using by CRISPR/Cas9 (Mou, H. et al., Genome Biol 18, 108, doi:10.1186/s13059-017-1237-8 (2017)). PRDM1 exon3 is the main region responsible for encoding the N-terminal PR domain in PRDM1 (PRDI-BF1 or Blimp-1) protein. Previous studies have shown that disruption of the PR domain can result in a dramatic loss of repressive function on multiple target genes. These results demonstrated that CLASH PRDM1-cr1 generated a PRDM1 exon3 skipping variant and produced a truncated PRDM1 protein in human primary T cells.

[0536] To compare PRDM1-cr1 and PRDM2-cr2 function on CD8⁺ T cells and CD22 CAR-T cells, cells generated 5 days post transduction were analyzed by flow cytometry, assessing phenotypes of effector-to-memory transition (CD62L, CCR7, CD28 and IL7R), cytotoxicity (IFNγ, TNFα, and Granzyme B/GZMB), and T cell exhaustion (LAG3 and TIM3). The data showed that both PRDM1-cr1 and PRDM2-cr2 variants have similar phenotypes, including higher effector-to-memory transition markers (FIGS. 4E-4H), lower effector markers as evident in GZMB, IFNγ and TNFα while human PBMC-derived CD8 T cells without CAR showed baseline effector cytokine levels across all groups (FIGS. 4I-4K), and lower exhaustion markers as evident in LAG3 and TIM3 (FIGS. 4L-4M). Interestingly, PRDM1-cr1 mutant CAR-Ts have more pronounced effects on CD62L, CD28, IL7R, TIM3 and LAG3 phenotypes as compared with PRDM1-cr2 (FIGS. 4E-4F, 4L, 4M).

[0537] To further confirm the PRDM1 effect on the CAR-T cells, the memory markers CCR7 and CD62L on different healthy donors were measured 5 days post transduction. Consistent with previous results, both markers were increased by editing of PRDM1-cr1 in all five donors (FIGS. 4N-4O). Additionally, PRDM1 mutant CAR-T cells were found to have significantly higher antigen-specific proliferative capacity and cytotoxicity than vector CAR-T cells in response to NALM6 cancer cell stimulation in two different donors, although the proliferation effect only become prominent after d11/d12 post transduction (FIGS. 4P-4Q). Long-term cytokine release also was monitored for each round of stimulation. It was observed that IFNγ production in PRDM1 CAR-T cells in response to specific antigen was lower than that of vector CAR-T cells at the beginning. However, while vector CAR-T cells continued to lose the ability to produce IFNγ each round, PRDM1 CAR-T cells were able to maintain the ability, and as a result, had a higher proportion of IFNγ producer cells than vector CAR-T cells at the endpoint of the experiment (Round 7) (FIG. 4R). Little difference was observed between the two groups for TNFα. Granzyme B was consistently lower in PRDM1 CAR-T cells as compared to vector. In the co-culture experiment endpoint, it was observed that as compared to vector cells, the long-term cultured, antigen-experienced PRDM1 CAR-T cells have significantly higher cytotoxic effect against NALM6 cancer cells, across all E:T ratios, in CARs generated from three independent donors (FIGS. 4S-4T). These data indicated that PRDM1 mutant CAR-Ts have enhanced memory phenotypes and are capable of maintaining longer-term effector function under continuous antigen exposure.

[0538] Genome-Wide Profiling of CLASH-PRDM1 Mediated AAV Integration

[0539] Previous studies have shown that the CRISPR/Cpf1 system has higher editing specificity compared to Cas9 nuclease by using GUIDE-seq, Digenome-seq and BLISS (Kleinstiver, B P. et al., Nature biotechnology 34, 869-874 (2016); Kim, D. et al., Nature biotechnology 34, 863-868 (2016); Yan, W X., et al., Nature communications 8, 1-9 (2017)). A recent study performed deep profiling and revealed the heterogeneity of integration outcomes in CRISPR knock-in experiments (Canaj, H. et al., bioRxiv 841098; doi: 10.1101/841098 (2019)). Considering these studies, in order to profile and quantify the CLASH-PRDM1 mediated genome-wide AAV integration, a new method based on GUIDE-seq (Tsai, S Q. et al., Nat Biotechnol., 33:187-197 (2015)) was developed and applied to CLASH-PRDM1 CAR-T cells with an AAV-only control without Cpf1 mRNA electroporation. The genomic DNA samples were collected in triplicate and sheared by a sonication, and the products were ligated with adaptors after end-repairing and dA-tailing. A 5′ biotinylated primer which targets a unique part of the CLASH vector was designed to bait the integrated sequences with unknown prey sequences. These junctions containing CLASH unique sequences were enriched via binding to streptavidin-coated magnetic beads. The sequencing barcodes were added during second round nested PCR.

[0540] Using ITR-based query sequences, a computational pipeline was established to identify chimeric off-target reads and their locations in the human genome. Integrative Genomics Viewer (IGV) based visualization of the normalized reads throughout the human genome showed a clean baseline level in the AAV-only control, and a small number of detectable peaks for CLASH-PRDM1 samples. Circos plot visualizations showed a similar pattern, with the distribution of off-target integration events throughout the human genome and relative frequencies, with the locations of peaks labelled at the center. It was observed that the mean genome-wide sum frequencies of off-target integration events in CLASH-PRDM1 samples was 0.62%, compared to 0.15% in samples receiving only the AAV vector without the Cpf1 mRNA. Certain detectable off-target integration events were observed at genomic loci around CD8A, TUBA1B, PVT1, TRAC, and PRDM1. For example, the mean off-target integration frequency at the PRDM1 locus was 0.2%, 0.05% at the TRAC locus, and 0.1% at the CD8A locus. Further zoom-in views of IGV-based visualizations showed the locations for the off-target integration events at the individual gene level. These experiments measured the genome-wide AAV off-target integration events occurring with CLASH-PRDM1 CAR-T generation, and estimated an overall genome-sum off-target integration rate at sub-percentage levels.

### Example 5: PRDM1 Mutant CAR-Ts Show Enhanced Therapeutic Efficacy In Vivo

### Materials and Methods

[0541] PRDM1 vs Control CD22 CAR-T Time-Course mRNA-Seq Experiment

[0542] T cells were infected with CLASH vector and PRDM1-cr1 CAR22 AAV6 after electroporation with NLS-LbCpf1mRNA. After electroporation for 5 days, the percentage of positive CAR-T cells was determined by staining with CD3 and CAR specific antibodies as previously described. CAR-T cells were co-cultured with NALM6 at low E:T (0.2:1) ratio every 4-7 days and a total of 5 rounds was performed. CAR-T cells were harvested using TRIzol (Invitrogen) after each round of stimulation. RNA was extracted using RNeasy Plus mini isolation kit (Qiagen). mRNA library preparations were performed using a NEBNext® Ultra™ RNA Library Prep Kit for Illumina and samples were multiplexed using barcoded primers provided by NEBNext® Multiplex Oligos for Illumina® (Index Primers Set 1). Libraries were sequenced with Novaseq systems (Illumina).

[0543] mRNA-Seq Processing

[0544] FASTQ files from mRNA sequencing were analyzed using the Kallisto quant algorithm with setting-b 100 for transcript quantification (Bray N L., et al., Nature biotechnology, 34:525-527 (2016)). Differential expression analysis was performed using Sleuth (Pimental H., et al., Nat Methods, 14(7):687-690 (2017)). Differentially upregulated and downregulated genes were selected for DAVID analysis using a Q value cutoff of 1×10⁻³ (Sherman B T., and Lempicki R A., Nat. Protoc., 4(1):44-57 (2009)). Z-scores for time course heatmap were calculated by log 2-normalizion of gene counts following by scaling by genes, and differentially expressed genes across the time points were determined by limma with contrasts set up to compare PRDM1 vs vector control CAR-T cells at each time point. Time course cluster analysis was performed with the R package maSigPro using “two.ways.forward” as step method and otherwise default settings. Visualizations of differentially expressed genes such as volcano plots and heatmaps were generated using standard R packages such as ggplot2 and VennDiagram.

[0545] In Vivo CAR-T Efficacy Testing in Mouse Models

[0546] NOD.Cg-Prkdc^{scid} Il2rg^{tm1Wj1}/SzJ (NSG) mice were purchased from the Jackson Laboratory and bred in-house. Both male and female NSG mice between 6-8 weeks old were used and inoculated with 5×10⁵ NALM6-GL cells intravenously. Mice were randomly assigned to different groups prior to treatment. 1.2×10⁶ normal CD8 T cells, vector CAR-T cells or PRDM1 mutant CAR-T cells were infused into mice after 3 days. Bioluminescent signal for each mouse was captured using In Vivo Imaging System (IVIS) every 3-5 days. Briefly, to generate bioluminescence signals, XenoLight D-Luciferin (Perkin Elmer) was intraperitoneally injected into mice at 150 mg/kg and images were analyzed by living image software. To test T cell phenotypes in vivo after treatment, NSG mice was euthanized at day 18. Peripheral blood, spleen and bone marrow was collected immediately. Red blood cells were lysed by incubation with ACK (Ammonium-Chloride-Potassium) Lysing Buffer (Thermo Fisher) for 2 minutes. After wash, the cell surface markers were labeled as described above for FACS and measured by BD FACSAria II.

[0547] Randomization

[0548] In animal experiments, mice were randomized by sex, cage and littermates. In vitro experiments were not randomized.

[0549] Blinding

[0550] Investigators were blinded to the identity and treatment groups of animals when measuring tumor burden. Investigators were not blinded in in vitro experiments. In NGS data analysis, investigators were blinded for initial processing of the original data using key-coded metadata.

### Results

[0551] The pre-clinical therapeutic efficacy of PRDM1 mutant CAR-T cells compared to their vector counterpart was then tested in vivo. In a NALM6-GL leukemia tumor model in immunodeficient NOD.Prkdc^{(SCID)}/Il2rγ^{-/-} (NSG) mice, efficacy testing was performed by adoptive transfer of anti-CD22 CAR-Ts followed by monitoring of tumor burden (FIG. 5A). The NALM6 cells were first confirmed to be CD19; CD22 double positive prior to being used for tumor induction. IVIS imaging was performed to follow the tumor burden in leukemic animals treated by untransduced CD8 T cells, vector transduced anti-CD22 CAR-T cells, and PRDM1 edited anti-CD22 CAR-T cells and observed that PRDM1 mutant anti-CD22 CAR-T cells showed significantly enhanced leukemia suppression than vector CAR-T cells. Substantial differences were observed in tumor burden between vector and PRDM1 anti-CD22 CAR-T cell treated mice, starting 19 days post T cell adoptive transfer (22 days post tumor induction) (FIG. 5B). These data showed that PRDM1 mutant CD22 CAR-Ts have stronger in vivo efficacy against cancer in a mouse model of leukemia.

[0552] To further validate the results, an independent AAV-CLASH vector with a different CAR construct against the CD19 antigen (anti-CD19 CAR-T, CD19 CAR, CAR19) was constructed. PRDM1 mutant CD19 CAR-T cells were similarly generated along with vector control CD19 CAR-T cells, followed by in vivo efficacy testing using a similar cancer induction and adoptive transfer treatment regimen. Similar results were observed in CD19 CAR-T cells in vivo, where PRDM1 CD19 CAR-T cells showed significantly enhanced leukemia suppression compared to vector CAR-T cells (FIG. 5C). Blood and organs from the animals treated in both groups were isolated and the abundance of persistent CAR-Ts in vivo was quantified. Two weeks after CAR-T infusion, higher numbers of CAR-T cells and CAR-T to tumor ratio were observed in the blood, bone marrow and spleen of recipients of PRDM1 CAR-T cells (FIGS. 5D-5F). Consistent with in vitro findings, CAR-T cells from the bone marrow and spleen showed significantly higher levels of CD45RO⁺CD62L⁺ (Tcm) in mice treated with PRDM1 CAR-T cells as compared to vector group (FIGS. 5G-5I). These data indicated that PRDM1 mutant CAR-T cells have enhanced efficacy, along with increased persistence and memory marker expression in vivo.

[0553] The pre-clinical therapeutic efficacy of PRDM1 mutant CAR-T cells (compared to vector counterpart) was further evaluated in vivo, in the context of survival of cancer-bearing animals. A NALM6-GL leukemia tumor model in immunodeficient NOD.Prkdc(SCID)/Il2rγ−/− (NSG) mice, was used to perform efficacy testing by adoptive transfer of anti-CD22 CAR-Ts followed by assessment of end-point survival. End-point survival was recorded either as poor body condition score (BCS <=1), or actual death, whichever was earlier. Two experiments were performed, one with adoptive transfer of CAR-T cells at day 3 post tumor induction, the other with adoptive transfer at day 8. In both experiments, it was observed that leukemia-bearing animals treated with PRDM1 mutant CD22 CAR-T cells showed significantly longer survival than animals treated with vector CAR-T cells (FIGS. 5J-5K). These data show that PRDM1 mutant CD22 CAR-Ts have stronger in vivo efficacy against cancer in a mouse model of leukemia.

[0554] To further validate these results, PRDM1 mutant CD19 CAR-T cells were similarly tested along with vector control anti-CD19 CAR-T cells. The in vivo efficacy testing was performed as above for anti-CD22 CAR, but with adoptive transfer of CAR-T cells only at day 3 post tumor induction. Results showed that leukemia-bearing animals treated with PRDM1 mutant anti-CD19 CAR-T cells showed significantly longer survival than animals treated with vector CAR-T cells (FIG. 5L). These data show that PRDM1 mutant anti-CD19 CAR-Ts have stronger in vivo efficacy against cancer in a mouse model of leukemia.

[0555] To further understand the molecular underpinnings of PRDM1 phenotypes and the basis for enhanced efficacy specifically in CAR-T cells, a time-course transcriptomics experiment was performed in biological triplicate in PRDM1 CAR-T cells, vector control CAR-T cells, and the untransduced human CD8 T cell as a baseline. These transcriptome profiles revealed a systematic landscape of CAR-T gene expression with continuous cognate cancer antigen stimulation along the time line. Distinct sets of differentially expressed genes were identified in the direct comparison between PRDM1 and vector control CAR-T cells (FIG. 6A), revealing a panel of highly significant downstream targets. PRDM1 CAR-Ts showed significant induction of genes such as PCDH8, SELL/CD62L, PTPN14, RASA3, KLF2, STAT6, STAT1, PRDM1 itself, IRF4 and NFKB1; and repression of genes such as CCLS, BATF, CXCR6, IL13, PRF1, IFIT13, ID2 and RUNX3 (FIG. 6A).

[0556] Interestingly, the alterations in gene expression showed a gradient pattern in both directions; increasing expression of PRDM1-induced genes and decreasing expression of PRDM1-repressed genes with time (thus along additional rounds of stimulation). To rigorously quantify and deconvolve the time factor effect, a time-series cluster analysis was performed. MaSigPro time course cluster analysis revealed experiment-wide expression profiles of different gene clusters each containing genes with similar expression patterns along time and similar behaviors between PRDM1 mutant vs control CAR-T groups. This analysis revealed nine distinct clusters of genes with completely different behaviors along the time course between the two groups: Cluster 1 genes decrease over time (thus stimulation) for both PRDM1 and vector control CAR-T cells; Cluster 2, the largest cluster among all, contains genes that strongly increase over time in control CAR-T cells, but fail to do so in PRDM1 CAR-T cells (representative examples include HAVCR2 and WNT11); Cluster 3 contains genes that decrease over time in control, but in contrast behave the opposite, increasing in PRDM1 CAR-T cells (representative examples include STAT1, STAT6, NFKB1, and IRF4); Cluster 4 contain genes stable over time in control but which sharply drop in PRDM1 CAR-T cells; Cluster 5 contains genes stable over time in control but sharply increase in PRDM1 CAR-T cells; Cluster 6 contains genes that sharply decrease over time in control but remain stable in PRDM1 CAR-T cells (representative examples include KLF2, FOXO1, CD28, CD226, CDCA7); Cluster 7 are also dichotomy genes where the two groups are heading to opposite directions over time, where genes increase in control but decrease in PRDM1 group; Cluster 8 contains genes that increase over time in control, however they first rapidly drop and then become stable at low levels in the PRDM1 group (representative examples include LAG3 and ID2); the final and also the smallest cluster, Cluster 9, contains genes with shared and consistent induction patterns in both PRDM1 and vector control CAR-T cells.

[0557] To gain an overall picture of what pathways are enriched in the different clusters of genes, Gene Ontology analysis of enriched biological processes of the gene sets in each cluster was performed. The two clusters with similar gene set behaviors (Clusters 1 and 9) are both enriched in transcription factors. Interestingly, the clusters where PRDM1 and vector control CAR-T cells behave differently have distinct signatures: genes in Cluster 2 where PRDM1 editing inhibits the time-dependent inductions are enriched in signal transduction, cell adhesion and inflammatory responses; similarly, genes in Cluster 4 where PRDM1 editing led to rapid downregulation are enriched in chemokine-mediated signaling pathway, positive regulation of inflammatory response, negative regulation of type I interferon production and immune response. Concordantly, in Clusters 7 and 8 where genes in PRDM1 CAR-T are suppressed rather than induced, enriched pathways include negative regulation of T cell receptor signaling pathway, regulation of T cell activation and again, inflammatory response. In contrast, in Cluster 6 where PRDM1 prevents decrease of gene expression over time, strong signatures were found in proliferation, including mitotic nuclear division, cell division, chromosome segregation, sister chromatid cohesion, cell proliferation, GUS transition of mitotic cell cycle and DNA replication, consistent with the phenotype that PRDM1 CAR-T cells maintain the strong proliferative capability even after continuous antigen stimulation and multiple rounds of cancer cell killing. Differential expression analysis was also performed on the same dataset using pairwise group comparisons. Although by nature, non-clustering based differential expression analysis cannot capture cluster-specific signatures, these differential expression results from the three time points also validated the collective signatures of T cell proliferation and apoptosis, T cell differentiation, signal transduction, inflammatory response and immune responses in PRDM1 CAR-T cells (FIGS. 6B-6C).

### Example 6: PRDM1 Mutant CAR-Ts Rewired Multiple Immunological Programs

### Materials and Methods

[0558] RT-PCR

[0559] RNA was extracted as described in RNA-seq. cDNA for qPCR was generated using M-MLV reverse transcriptase enzyme (Sigma) and Oligo dT (Thermo Fisher) following the manufacture's protocol. For the PRDM1 mutant sequence analysis, PCR was performed by using primers near the PRDM1-cr1 cutting site by using the cDNA as template. For the RNA-seq validation, the cDNA was subjected to qPCR using TaqMan Real-Time PCR Master Mixes and Taqman gene assay probes (Thermo Fisher). Samples were processed using Applied Bioscience Step One Plus Real Time machine and relative mRNA expression was normalized to GAPDH controls. Relative mRNA expression was determined via the AA C method.

### Results

[0560] The gene expression signatures in PRDM1 edited CAR-T prompted investigation into the underlying immunological programs, such as T cell differentiation, memory features, T cell exhaustion, T cell activation, cytokine and chemokine production, as well as signaling pathways. It was observed that some Cluster 6 genes, CD28 and IL7R, two of the T cell memory surface markers, were significantly upregulated across all 3 time points (rounds of NALM6 stimulation) in PRDM1 edited CAR-T as compared to vector control (FIGS. 7A-7B). Consistent with the time-course RNA-seq, the upstream regulators such as KLF2 and S1PR1, also Cluster 6 genes, exhibited a descending trend with continuous antigen exposure, but this effect was reversed by editing of PRDM1 in CAR-T cells (FIGS. 7C-7D). Transcription factors (TFs) that regulate the differentiation of effector and memory T cells were then examined (Chang J T., et al., Nat Immunol., 15(12):1104-15 (2014); Michelini R H., et al., J Exp Med. 210(6):1189-200 (2013)). It was observed that effector-driving TFs such as TBX21, ID2 and RUNX3, were significantly downregulated in PRDM1 mutant CAR-T cells. In contrast, FOXO1, a factor essential for the formation of long-lived memory cells, was upregulated in PRDM1 CAR-T cells in the first two rounds of stimulation (FIGS. 7E-7F). In addition, NFKB1, STAT1, STAT6, and CDCA7, master regulators for the proliferation of T and other immune cells associated genes, were significantly increased in PRDM1 CAR-T cells as compared to vector control cells, and gradually diminished over time with continuous antigen stimulation (FIGS. 7G-7J). On the other hand, IFIT3 and SOCS1, genes that inhibit proliferation of T cells, were downregulated in a time-dependent manner in PRDM1 CAR-T cells as compared to vector control. The alterations of these underlying major pathways are consistent with the increased persistence and sustained proliferative capabilities of PRDM1 CAR-Ts.

[0561] Other pivotal markers for pathways of T cell function were further examined in PRDM1 CAR-T cells. BATF, a Cluster 7 gene that encodes an AP-1/ATF superfamily of transcription factor that regulates effector CD8 T-cell differentiation (Kurachi M., et al., Nat. Immunol., 15(4):373-83 (2014)), was rapidly induced with antigen stimulation in regular vector control CAR-T cells, but this induction was abolished in PRDM1 mutant CAR-T cells (FIG. 7J), consistent with the time-course RNA-seq. Several genes encoding inflammatory chemokines/cytokines including CXCR6 (Cluster 7), IL13 (Cluster 7) and PRF1 (Cluster 8) were also observed to be dramatically downregulated in PRDM1 mutant CAR-T cells as compared to vector control, again in concordance with the time-course RNA-seq. PTPN14, a Cluster 5 gene that encodes a member of the protein tyrosine phosphatase (PTP) family that regulates a variety of cellular processes including cell growth, differentiation, mitotic cycle, and oncogenic transformation (Pike K A. and Tremblay M L., Front. Immunol., 9:2504 (2018)), was highly induced in PRDM1 CAR-T cells as compared to vector control. In contrast, WNT11, a Cluster 2 gene that encodes a WNT/beta-catenin pathway signaling receptor (Van Loosdregt, J., and Coffer, P J., J. Immunol., 201(8):2193-2200 (2018)), was rapidly induced by NALM6 stimulation in vector control T cells, but its induction was completely abolished in PRDM1 CAR-T cells, a signature of the Cluster 2 gene behavior. In addition, PCDH8 showed strong induction in PRDM1 CAR-T cells, but not vector control CAR-T cells, and RIN3 showed strong induction in vector control but not PRDM1 CAR-T cells.

[0562] It was hypothesized that perturbation of PRDM1 may reduce T cell exhaustion in CAR-Ts. Consistent with the time-course RNA-seq, flow cytometry analysis showed that PRDM1 CAR-T cells have decreased levels of TIM3, a canonical immune checkpoint encoded by the HAVCR2 gene that also falls into Cluster 2 of the RNA-seq time course (FIG. 7L). Additional surface checkpoints such as LAG3, 2B4/CD244 and CD39/ENTPD1 were also significantly and consistently reduced on the T cell surface (FIGS. 7M-70), indicating a robust dampening of exhaustion in PRDM1 CAR-T cells. Together, these data demonstrate that PRDM1 CAR-T cells showed improvement over control CAR-Ts via increased memory phenotype, decreased T cell terminal differentiation, enhanced cell proliferation, and reduced T cell exhaustion upon chronic cancer antigen exposure (FIG. 7P).

[0563] CLASH is a versatile platform for massive-scale engineering of CAR-T cells, which is currently viewed as “living drugs” in immunotherapies. In contrast to non-viral and DNA-based cDNA transgene knock-ins, the CLASH system takes advantage of AAV vectors which allow for highly efficient human T cell transduction as well as large scale perturbations, by simply creating the viral vectors in a pooled manner. CRISPR/Cas9 gene editing for targeted delivery of a CAR gene into a specific locus such as TRAC, can enhance T cells potency and increase tumor rejection compared to random integration in retroviral or lentiviral vectors (Eyquem J., et al., Nature 543, 113-117 (2017)). Non-viral DNA electroporation has been used to create a medium number (36) of transgenes knocking into the genome of normal human T cells (Roth T L., et al., Cell, 181(3):728-744.e21 (2020)), but not CAR-T cells.

[0564] The CLASH system facilitated AAV-HDR mediated CAR-T knock-in into TRAC and introduction of a third perturbation by carrying another user-defined crRNA in the same vector. The flexibility of the wildcard crRNA as well as the simplicity to readily scale up large numbers of crRNAs in a pool makes it simple to perform massively parallel perturbations by CLASH, in contrast to the limitations of cDNAs that differ between each construct and are difficult to scale up high. Thus, CLASH allows for simultaneous transduction of large numbers of human T cells to engineer stably knocked-in CAR constructs with massively targeted diversity. The resulting pool of T cell variants therefore immediately permit high-throughput selection or screening of desired phenotypes from the pool in an unbiased and quantitative manner. As demonstrated in the examples, the representation of the knock-in pool can be directly read out by next generation sequencing (NGS).

[0565] Large-scale CRISPR screens have been applied to human and mouse primary T cells with lentiviral vectors (Dong M B., et al., Cell, 178(5):1189-1204.e23 (2019); Shifrut M., et al., Cell, 175:1958-1971. e1915 (2018); Ting P Y., et al., Nat. Methods, 15(11):941-946 (2018); Ye L., et al., Nat Biotechnol., 37(11):1302-1313 (2019)), and more recently by the transposon system. However, unlike existing lentiviral vector or transposon based CRISPR libraries that randomly integrate into the genome, the CLASH system precisely targets all CAR-T variants into the same locus, thus creating a series of variants controlling for position effect and thereby avoiding insertional mutagenesis in the genome of CAR-T cells. The tracr-independent Cas12a/Cpf1 system also facilitates multiplexed targeted mutagenesis as the same polymerase III promoter can drive a string of crRNAs (e.g., crTRAC-crWildcard), to allow the whole knock-in/knock-out construct to comfortably fit into the 4.7 kb packaging limit of an AAV vector. Besides T cells, the CLASH technology can be applied to many other cell types, such as, other primary immune cells or stem cells.

[0566] The CLASH system was used to comprehensively interrogate immunologically relevant genetic perturbations that enhance CAR-T cell persistence upon long-term cancer antigen stimulation. To maximize the probability of hitting clinically relevant targets, immune-focused, T cell-centric libraries, Rene and Descartes were designed. The AAV-CLASH-Descartes library efficiently generated a large, functionally diverse CD22 CAR-T cell pool, which was subjected to long-term CAR-T culture with antigen specific cancer cell co-culture. The co-culture system itself exhibited a phenotype consistent with exhausted CAR-T cells, which was accompanied by increased T cells terminal differentiation, low proliferation and poor cytokine release capacity (Wherry E J., Nature immunology 12, 492-499 (2011)). The long-term co-culture selection pressure enriched for a series of genes which could promote CAR-T cell survival by increasing killing ability, cell proliferation or overcoming T cell exhaustion. Among these genes, TE72, one of the top hits, has been shown to improve the efficacy and persistence of CAR-T cells after disruption (Fraietta et al., 2018), demonstrating the validity of the platform.

[0567] Systematic deconvolution of the CLASH CAR-T time-course library dynamics using NGS and analysis, revealed a comprehensive map of the quantitative effects of individual genes in the Descartes library. This identified a number of candidates that modulate the function in CAR-T cells. PRDM1 CAR-T cells displayed a central memory phenotype which mediated potent anti-tumor effects in advanced leukemia. Finally, time-course RNA-seq analysis permitted a dynamic assessment of the functional consequences of perturbing PRDM1.

[0568] PRDM1 was previously known as a critical transcriptional regulator for B cell and T cell differentiation (Rutishauser et al., 2009). Recent studies uncovered that PRDM1 mediated T cell exhaustion via upregulation of TIGIT and PD-1 in patients (Zhu L., et al., J Hematol Oncol., 10(1):124 (2017)). However, these were done in normal primary cells but not CAR-Ts. Thus, this interrogation was performed directly in the CAR-T setting. With the interesting case of PRDM1-cr1, this construct is capable of generating a unique exon3-skip mutant of PRDM1 resulting in a truncated protein product. With CLASH engineered CAR-Ts, it was observed that PRDM1 perturbation in CAR-T cells manifest increased proliferative capacity and central memory phenotype in vitro and in vivo in both CD22 CAR and CD19 CAR settings. PRDM1 CD22 CAR and CD19 CAR both showed superior efficacy compared to the respective control CARs. The examples demonstrate that PRDM1 CAR-Ts are better than the control counterparts in leukemia models.

[0569] PRDM1 has been previously reported to recruit proteins or corepressor complexes to modify histones and repress transcription such as G9a histone methyl transferases (Gyory I., et al., Nature immunology 5:299-308 (2004)). Additional research has found a number of differentially expressed genes containing predicted PRDM1 binding sites, such as BCL6, ID3 and cMYC (Crotty S., et al., Nature immunology 11, 114-120 (2010); Martins G. and Calame K. Annu Rev Immunol., 26:133-169 (2008)). Knockout of PRDM1 in CD8 T cells sustained cytokine responsiveness and increased proliferation resulted from increased expression of CD25 and CD27 (Shin H M., et al., Immunity 39, 661-675 (2013)). The above studies on the mechanisms of PRDM1 perturbation in CAR-T cells showed certain conserved pathways, however these were not identical to previous studies potentially due to the CAR-T specific setting. BCL6, CD25 and CD27 were not increased after editing of PRDM1 in CAR-T cells. It is possible that the PRDM1-targeting crRNA did only change the PR domain and therefore leave the zinc finger domain unaltered. Previous studies reported promoter hypermethylation-mediated silencing of PRDM1 may contribute to the pathogenesis of Natural killer/T-cell lymphoma (NKTCL) (Iqbal J., et al., Leukemia 23, 1139-1151 (2009)). However, the loss-of-function mutations of PRDM1 are rarely observed in NKTCL (Kugiik C., et al., Ther Adv Med Oncol. 12:1758835919900856 (2020)). Given the fact that no pathogenic or oncogenic transformation of PRDM1 engineered CAR-T cells was observed, and the fact that most of CAR-T cells fade away in vivo due to lack of persistence, rather than over-proliferation, it is plausible that PRDM1 editing can confer a favorable therapeutic window to allow enhancement of CAR-T therapeutic efficacy with a manageable toxicity or other risks of side effects.

[0570] Though the Examples demonstrate the CAR-T CLASH system in leukemia models, this system can also be applied to other tumor types and other forms of CAR-Ts, simply by switching the knock-in CAR construct. There are challenges to successfully applying CAR-T cells to solid tumors due to poor T cell trafficking ability and the immunosuppressive environment in many advanced solid tumors (Lim, W A., and June, CH., Cell 168:724-740 (2017)). These challenges can be addressed using CAR-T cell tumor infiltration or time-dependent persistence models in vivo, and selecting new variants of CAR-Ts to enhance solid tumor CAR-T persistence, or, in certain more sophisticated settings, utilizing multiple transgenic reporters or immune markers for massively parallel engineering of new CAR-Ts to overcome suppressive components in the tumor microenvironment. To overcome various immune defects associated with cancer treatment and simplify the manufacturing of CAR-T cells, application of CLASH in models of allogeneic or universal CAR-T systems can facilitate the development of new strategies, expanding the current methods such as using gene editing to remove functional endogenous TCR. The versatility of the CLASH system opens multiple new venues for on-demand engineering of CAR-Ts with efficiency and precision.

[0571] Unless defined otherwise, all technical and scientific terms used have the same meanings as commonly understood by one of skill in the art to which the disclosed invention belongs. Cited publications and the materials for which they are cited are specifically incorporated by reference.

[0572] Those skilled in the art will recognize, or be able to ascertain using no more than routine experimentation, many equivalents to the specific embodiments of the described method and compositions. Such equivalents are intended to be encompassed by the following claims.

The application's sequence listing, which the Patent Office published only in electronic form, follows.

SEQUENCE LISTING (12246 sequences)

SEQ ID NO: 1 - DNA, 6488 bp, Artificial Sequence
  Synthetic: pXD060 vector
cctgcaggcagctgcgcgctcgctcgctcactgaggccgcccgggcaaagcccgggcgtcgggcgacctttggtcgcccggcctcagtgagcgagcgagcgcgcagagagggagtggccaactccatcactaggggttcctgcggccgcacgcgtgatgtaaggagctgctgtgacttgctcaaggccttatatcgagtaaacggtagtgctggggcttagacgcaggtgttctgatttatagttcaaaacctctatcaatgagagagcaatctcctggtaatgtgatagatttcccaacttaatgccaacataccataaacctcccattctgctaatgcccagcctaagttggggagaccactccagatttcaagatgtacagtttgctttgctgggcctttttcccatgcctgcctttactctgccagagttatattgctggggttttgaagaagatcctattaaataaaagaataagcagtattattaagtagccctgcatttcaggtttccttgagtggcaggccaggcctggccgtgaacgttcactgaaatcatggcctcttggccaagattgatagcttgtgcctgtccctgagtcccagtccgtcacgagcagctggtttctaatatgctatttcccgtataaagcatgagaccgtgacttgccagccccacagagccccgcccttgtccatcactggcatctggactccagcctgggttggggcaaagagggaaatgagatcatgtcctaaccctgatcctcttgtcccacagatatccagaaccctgacccgcgttagcgctagaagagggcctatttcccatgattccttcatatttgcatatacgatacaaggctgttagagagataattggaattaatttgactgtaaacacaaagatattagtacaaaatacgtgacgtagaaagtaataatttcttgggtagtttgcagttttaaaattatgttttaaaatggactatcatatgcttaccgtaacttgaaagtatttcgatttcttggctttatatatcttgtggaaaggacgaaacaccgtaatttctactaagtgtagatgagtctctcagctggtacactaatttctactaagtgtagatggtcttcgagaagaccttttttaagcttggcgtggatccgatatcaactagatcttgagacaaggtacctaggtcttgaaaggagtgggaattggctccggtgcccgtcagtgggcagagcgcacatcgcccacagtccccgagaagttggggggaggggtcggcaattgatccggtgcctagagaaggtggcgcggggtaaactgggaaagtgatgtcgtgtactggctccgcctttttcccgagggtgggggagaaccgtatataagtgcagtagtcgccgtgaacgttctttttcgcaacgggtttgccgccagaacacaggaccggttctagacgtacggccaccatgcttctgctcgtgacaagcctgctgctgtgcgagctgccccaccctgcctttctgctgatccctcaggtgcagctgcagcagtctggccctggcctcgtgaagcctagccagaccctgagcctgacctgtgccatcagcggcgatagcgtgtccagcaatagcgccgcctggaactggatcagacagagccctagcagaggcctggaatggctgggccggacctactaccggtccaagtggtacaacgactacgccgtgtccgtgaagtcccggatcaccatcaaccccgacaccagcaagaaccagttctccctgcagctgaacagcgtgacccccgaggataccgccgtgtactactgcgccagagaagtgaccggcgacctggaagatgccttcgacatctggggccagggcacaatggtcaccgtgtctagcggaggcggcggaagcgacatccagatgacacagagccccagctccctgagcgccagcgtgggagacagagtgaccatcacctgtcgggccagccagaccatctggtcctacctgaactggtatcagcagcggcctggcaaggcccccaacctgctgatctatgccgccagctcactgcagagcggcgtgcccagcagattttccggcagaggcagcggcaccgacttcaccctgacaatcagttccctgcaggccgaggacttcgccacctactactgccagcagagctacagcatcccccagaccttcggccaggggaccaagctggaaatcaaagcggccgcaggtaccaccacgacgccagcgccgcgaccaccaacaccggcgcccaccatcgcgtcgcagcccctgtccctgcgcccagaggcatgccggccagcagcagggggcgcagtgcacacgagggggctggacttcgcctgtgatatctacatctgggcgcccttggccgggacttgtggggtccttctcctgtcactggttatcaccctttactgcaaacggggcagaaagaaactcctgtatatattcaaacaaccatttatgagaccagtacaaactactcaagaggaagatggctgtagctgccgatttccagaagaagaagaaggaggatgtgaactgagagtgaagttcagcaggagcgcagacgcccccgcgtaccagcagggccagaaccagctctataacgagctcaatctaggacgaagagaggagtacgatgttttggacaagagacgtggccgggaccctgagatggggggaaagccgagaaggaagaaccctcaggaaggcctgtacaatgaactgcagaaagataagatggcggaggcctacagtgagattgggatgaaaggcgagcgccggaggggcaaggggcacgatggcctttaccagggtctcagtacagccaccaaggacacctacgacgcccttcacatgcaggccctgccccctcgctaagctagcaataaaagatctttattttcattagatctgtgtgttggttttttgtgtggtaccgagagactctaaatccagtgacaagtctgtctgcctattcaccgattttgattctcaaacaaatgtgtcacaaagtaaggattctgatgtgtatatcacagacaaaactgtgctagacatgaggtctatggacttcaagagcaacagtgctgtggcctggagcaacaaatctgactttgcatgtgcaaacgccttcaacaacagcattattccagaaaacaccttcttccccagcccaggtaagggcagctttggtgccttcgcaggctgtttccttgcttcaggaatggccaggttctgcccagagctctggtcaatgatgtctaaaactcctctgattggtggtctcggccttatccattgccaccaaaaccctctttttactaagaaacagtgagccttgttctggcagtccagagaatgacacggaaaaaaagcagatgaagagaaggtggcaggagagggcacgtggcccagcctcagtctctccaactgagttcctgcctgcctgcctttgctcagactgtttgccccttactgctcttctaggcctcattctaagccccttctccaagttgcctctccttatttctccctgtctgccaaaaaatctttcccagctcactaagtcagtctcacgcagtcactcattaacccacaattcgatatcaagcttaataaaagatctttattttcattagatctgtgtgttggttttttgtgtggtaaccacgtgcggaccgagcggccgcaggaacccctagtgatggagttggccactccctctctgcgcgctcgctcgctcactgaggccgggcgaccaaaggtcgcccgacgcccgggctttgcccgggcggcctcagtgagcgagcgagcgcgcagctgcctgcaggggcgcctgatgcggtattttctccttacgcatctgtgcggtatttcacaccgcatacgtcaaagcaaccatagtacgcgccctgtagcggcgcattaagcgcggcgggtgtggtggttacgcgcagcgtgaccgctacacttgccagcgccctagcgcccgctcctttcgctttcttcccttcctttctcgccacgttcgccggctttccccgtcaagctctaaatcgggggctccctttagggttccgatttagtgctttacggcacctcgaccccaaaaaacttgatttgggtgatggttcacgtagtgggccatcgccctgatagacggtttttcgccctttgacgttggagtccacgttctttaatagtggactcttgttccaaactggaacaacactcaaccctatctcgggctattcttttgatttataagggattttgccgatttcggcctattggttaaaaaatgagctgatttaacaaaaatttaacgcgaattttaacaaaatattaacgtttacaattttatggtgcactctcagtacaatctgctctgatgccgcatagttaagccagccccgacacccgccaacacccgctgacgcgccctgacgggcttgtctgctcccggcatccgcttacagacaagctgtgaccgtctccgggagctgcatgtgtcagaggttttcaccgtcatcaccgaaacgcgcgagacgaaagggcctcgtgatacgcctatttttataggttaatgtcatgataataatggtttcttagacgtcaggtggcacttttcggggaaatgtgcgcggaacccctatttgtttatttttctaaatacattcaaatatgtatccgctcatgagacaataaccctgataaatgcttcaataatattgaaaaaggaagagtatgagtattcaacatttccgtgtcgcccttattcccttttttgcggcattttgccttcctgtttttgctcacccagaaacgctggtgaaagtaaaagatgctgaagatcagttgggtgcacgagtgggttacatcgaactggatctcaacagcggtaagatccttgagagttttcgccccgaagaacgttttccaatgatgagcacttttaaagttctgctatgtggcgcggtattatcccgtattgacgccgggcaagagcaactcggtcgccgcatacactattctcagaatgacttggttgagtactcaccagtcacagaaaagcatcttacggatggcatgacagtaagagaattatgcagtgctgccataaccatgagtgataacactgcggccaacttacttctgacaacgatcggaggaccgaaggagctaaccgcttttttgcacaacatgggggatcatgtaactcgccttgatcgttgggaaccggagctgaatgaagccataccaaacgacgagcgtgacaccacgatgcctgtagcaatggcaacaacgttgcgcaaactattaactggcgaactacttactctagcttcccggcaacaattaatagactggatggaggcggataaagttgcaggaccacttctgcgctcggcccttccggctggctggtttattgctgataaatctggagccggtgagcgtgggtctcgcggtatcattgcagcactggggccagatggtaagccctcccgtatcgtagttatctacacgacggggagtcaggcaactatggatgaacgaaatagacagatcgctgagataggtgcctcactgattaagcattggtaactgtcagaccaagtttactcatatatactttagattgatttaaaacttcatttttaatttaaaaggatctaggtgaagatcctttttgataatctcatgaccaaaatcccttaacgtgagttttcgttccactgagcgtcagaccccgtagaaaagatcaaaggatcttcttgagatcctttttttctgcgcgtaatctgctgcttgcaaacaaaaaaaccaccgctaccagcggtggtttgtttgccggatcaagagctaccaactctttttccgaaggtaactggcttcagcagagcgcagataccaaatactgtccttctagtgtagccgtagttaggccaccacttcaagaactctgtagcaccgcctacatacctcgctctgctaatcctgttaccagtggctgctgccagtggcgataagtcgtgtcttaccgggttggactcaagacgatagttaccggataaggcgcagcggtcgggctgaacggggggttcgtgcacacagcccagcttggagcgaacgacctacaccgaactgagatacctacagcgtgagctatgagaaagcgccacgcttcccgaagggagaaaggcggacaggtatccggtaagcggcagggtcggaacaggagagcgcacgagggagcttccagggggaaacgcctggtatctttatagtcctgtcgggtttcgccacctctgacttgagcgtcgatttttgtgatgctcgtcaggggggcggagcctatggaaaaacgccagcaacgcggcctttttacggttcctggccttttgctggccttttgctcacatgt

SEQ ID NO: 2 - DNA, 6512 bp, Artificial Sequence
  Synthetic: pXD071 vector
cctgcaggcagctgcgcgctcgctcgctcactgaggccgcccgggcaaagcccgggcgtcgggcgacctttggtcgcccggcctcagtgagcgagcgagcgcgcagagagggagtggccaactccatcactaggggttcctgcggccgcacgcgtgatgtaaggagctgctgtgacttgctcaaggccttatatcgagtaaacggtagtgctggggcttagacgcaggtgttctgatttatagttcaaaacctctatcaatgagagagcaatctcctggtaatgtgatagatttcccaacttaatgccaacataccataaacctcccattctgctaatgcccagcctaagttggggagaccactccagatttcaagatgtacagtttgctttgctgggcctttttcccatgcctgcctttactctgccagagttatattgctggggttttgaagaagatcctattaaataaaagaataagcagtattattaagtagccctgcatttcaggtttccttgagtggcaggccaggcctggccgtgaacgttcactgaaatcatggcctcttggccaagattgatagcttgtgcctgtccctgagtcccagtccgtcacgagcagctggtttctaatatgctatttcccgtataaagcatgagaccgtgacttgccagccccacagagccccgcccttgtccatcactggcatctggactccagcctgggttggggcaaagagggaaatgagatcatgtcctaaccctgatcctcttgtcccacagatatccagaaccctgacccgcgttagcgctagaagagggcctatttcccatgattccttcatatttgcatatacgatacaaggctgttagagagataattggaattaatttgactgtaaacacaaagatattagtacaaaatacgtgacgtagaaagtaataatttcttgggtagtttgcagttttaaaattatgttttaaaatggactatcatatgcttaccgtaacttgaaagtatttcgatttcttggctttatatatcttgtggaaaggacgaaacaccgtaatttctactaagtgtagatgagtctctcagctggtacactaatttctactaagtgtagatggtcttcgagaagaccttttttaagcttggcgtggatccgatatcaactagatcttgagacaaggtacctaggtcttgaaaggagtgggaattggctccggtgcccgtcagtgggcagagcgcacatcgcccacagtccccgagaagttggggggaggggtcggcaattgatccggtgcctagagaaggtggcgcggggtaaactgggaaagtgatgtcgtgtactggctccgcctttttcccgagggtgggggagaaccgtatataagtgcagtagtcgccgtgaacgttctttttcgcaacgggtttgccgccagaacacaggaccggttctagacgtacggccaccatggccttaccagtgaccgccttgctcctgccgctggccttgctgctccacgccgccaggccggattacaaagacgatgacgataaggacatccagatgacacagactacatcctccctgtctgcctctctgggagacagagtcaccatcagttgcagggcaagtcaggacattagtaagtatttaaattggtatcagcagaaaccagatggaactgttaaactcctgatctaccatacatcaagattacactcaggagtcccatcaaggttcagtggcagtgggtctggaacagattattctctcaccattagcaacctggagcaagaagatattgccacttacttttgccaacagggtaatacgcttccgtacacgttcggaggggggaccaagctggagatcacaggtggcggtggctcgggcggtggtgggtcgggtggcggcggatctgaggtgaaactgcaggagtcaggacctggcctggtggcgccctcacagagcctgtccgtcacatgcactgtctcaggggtctcattacccgactatggtgtaagctggattcgccagcctccacgaaagggtctggagtggctgggagtaatatggggtagtgaaaccacatactataattcagctctcaaatccagactgaccatcatcaaggacaactccaagagccaagttttcttaaaaatgaacagtctgcaaactgatgacacagccatttactactgtgccaaacattattactacggtggtagctatgctatggactactggggccaaggaacctcagtcaccgtcacctcaaccacgacgccagcgccgcgaccaccaacaccggcgcccaccatcgcgtcgcagcccctgtccctgcgcccagaggcatgccggccagcagcagggggcgcagtgcacacgagggggctggacttcgcctgtgatatctacatctgggcgcccttggccgggacttgtggggtccttctcctgtcactggttatcaccctttactgcaaacggggcagaaagaaactcctgtatatattcaaacaaccatttatgagaccagtacaaactactcaagaggaagatggctgtagctgccgatttccagaagaagaagaaggaggatgtgaactgagagtgaagttcagcaggagcgcagacgcccccgcgtaccagcagggccagaaccagctctataacgagctcaatctaggacgaagagaggagtacgatgttttggacaagcgacgtggccgggaccctgagatggggggaaagccgagaaggaagaaccctcaggaaggcctgtacaatgaactgcagaaagataagatggcggaggcctacagtgagattgggatgaaaggcgagcgccggaggggcaaggggcacgatggcctttaccagggtctcagtacagccaccaaggacacctacgacgcccttcacatgcaggccctgccccctcgctaagctagcaataaaagatctttattttcattagatctgtgtgttggttttttgtgtggtaccgagagactctaaatccagtgacaagtctgtctgcctattcaccgattttgattctcaaacaaatgtgtcacaaagtaaggattctgatgtgtatatcacagacaaaactgtgctagacatgaggtctatggacttcaagagcaacagtgctgtggcctggagcaacaaatctgactttgcatgtgcaaacgccttcaacaacagcattattccagaaaacaccttcttccccagcccaggtaagggcagctttggtgccttcgcaggctgtttccttgcttcaggaatggccaggttctgcccagagctctggtcaatgatgtctaaaactcctctgattggtggtctcggccttatccattgccaccaaaaccctctttttactaagaaacagtgagccttgttctggcagtccagagaatgacacggaaaaaaagcagatgaagagaaggtggcaggagagggcacgtggcccagcctcagtctctccaactgagttcctgcctgcctgcctttgctcagactgtttgccccttactgctcttctaggcctcattctaagccccttctccaagttgcctctccttatttctccctgtctgccaaaaaatctttcccagctcactaagtcagtctcacgcagtcactcattaacccacaattcgatatcaagcttaataaaagatctttattttcattagatctgtgtgttggttttttgtgtggtaaccacgtgcggaccgagcggccgcaggaacccctagtgatggagttggccactccctctctgcgcgctcgctcgctcactgaggccgggcgaccaaaggtcgcccgacgcccgggctttgcccgggcggcctcagtgagcgagcgagcgcgcagctgcctgcaggggcgcctgatgcggtattttctccttacgcatctgtgcggtatttcacaccgcatacgtcaaagcaaccatagtacgcgccctgtagcggcgcattaagcgcggcgggtgtggtggttacgcgcagcgtgaccgctacacttgccagcgccctagcgcccgctcctttcgctttcttcccttcctttctcgccacgttcgccggctttccccgtcaagctctaaatcgggggctccctttagggttccgatttagtgctttacggcacctcgaccccaaaaaacttgatttgggtgatggttcacgtagtgggccatcgccctgatagacggtttttcgccctttgacgttggagtccacgttctttaatagtggactcttgttccaaactggaacaacactcaaccctatctcgggctattcttttgatttataagggattttgccgatttcggcctattggttaaaaaatgagctgatttaacaaaaatttaacgcgaattttaacaaaatattaacgtttacaattttatggtgcactctcagtacaatctgctctgatgccgcatagttaagccagccccgacacccgccaacacccgctgacgcgccctgacgggcttgtctgctcccggcatccgcttacagacaagctgtgaccgtctccgggagctgcatgtgtcagaggttttcaccgtcatcaccgaaacgcgcgagacgaaagggcctcgtgatacgcctatttttataggttaatgtcatgataataatggtttcttagacgtcaggtggcacttttcggggaaatgtgcgcggaacccctatttgtttatttttctaaatacattcaaatatgtatccgctcatgagacaataaccctgataaatgcttcaataatattgaaaaaggaagagtatgagtattcaacatttccgtgtcgcccttattcccttttttgcggcattttgccttcctgtttttgctcacccagaaacgctggtgaaagtaaaagatgctgaagatcagttgggtgcacgagtgggttacatcgaactggatctcaacagcggtaagatccttgagagttttcgccccgaagaacgttttccaatgatgagcacttttaaagttctgctatgtggcgcggtattatcccgtattgacgccgggcaagagcaactcggtcgccgcatacactattctcagaatgacttggttgagtactcaccagtcacagaaaagcatcttacggatggcatgacagtaagagaattatgcagtgctgccataaccatgagtgataacactgcggccaacttacttctgacaacgatcggaggaccgaaggagctaaccgcttttttgcacaacatgggggatcatgtaactcgccttgatcgttgggaaccggagctgaatgaagccataccaaacgacgagcgtgacaccacgatgcctgtagcaatggcaacaacgttgcgcaaactattaactggcgaactacttactctagcttcccggcaacaattaatagactggatggaggcggataaagttgcaggaccacttctgcgctcggcccttccggctggctggtttattgctgataaatctggagccggtgagcgtgggtctcgcggtatcattgcagcactggggccagatggtaagccctcccgtatcgtagttatctacacgacggggagtcaggcaactatggatgaacgaaatagacagatcgctgagataggtgcctcactgattaagcattggtaactgtcagaccaagtttactcatatatactttagattgatttaaaacttcatttttaatttaaaaggatctaggtgaagatcctttttgataatctcatgaccaaaatcccttaacgtgagttttcgttccactgagcgtcagaccccgtagaaaagatcaaaggatcttcttgagatcctttttttctgcgcgtaatctgctgcttgcaaacaaaaaaaccaccgctaccagcggtggtttgtttgccggatcaagagctaccaactctttttccgaaggtaactggcttcagcagagcgcagataccaaatactgtccttctagtgtagccgtagttaggccaccacttcaagaactctgtagcaccgcctacatacctcgctctgctaatcctgttaccagtggctgctgccagtggcgataagtcgtgtcttaccgggttggactcaagacgatagttaccggataaggcgcagcggtcgggctgaacggggggttcgtgcacacagcccagcttggagcgaacgacctacaccgaactgagatacctacagcgtgagctatgagaaagcgccacgcttcccgaagggagaaaggcggacaggtatccggtaagcggcagggtcggaacaggagagcgcacgagggagcttccagggggaaacgcctggtatctttatagtcctgtcgggtttcgccacctctgacttgagcgtcgatttttgtgatgctcgtcaggggggcggagcctatggaaaaacgccagcaacgcggcctttttacggttcctggccttttgctggccttttgctcacatgt

SEQ ID NO: 3 - DNA, 20 bp, Artificial Sequence
  Synthetic: rene_0001_ACTN1
atagccagcaaaggcgtcaa

SEQ ID NO: 4 - DNA, 20 bp, Artificial Sequence
  Synthetic: rene_0002_ACTN1
cccgcatcatgagcattgtg

SEQ ID NO: 5 - DNA, 20 bp, Artificial Sequence
  Synthetic: rene_0003_ACTN1
gagcccaggccaatgtcatc

SEQ ID NO: 6 - DNA, 20 bp, Artificial Sequence
  Synthetic: rene_0004_ACTN1
gcttgtagttgacgatgctc

SEQ ID NO: 7 - DNA, 20 bp, Artificial Sequence
  Synthetic: rene_0005_ACTN1
tctgacaccacaggagcagc

SEQ ID NO: 8 - DNA, 20 bp, Artificial Sequence
  Synthetic: rene_0006_ACTN1
acgtggcagagaagtacctg

SEQ ID NO: 9 - DNA, 20 bp, Artificial Sequence
  Synthetic: rene_0007_ACTN1
acgcctttgctggctatgaa

SEQ ID NO: 10 - DNA, 20 bp, Artificial Sequence
  Synthetic: rene_0008_ACTN1
cgcgcctgcctgatctccat

SEQ ID NO: 11 - DNA, 20 bp, Artificial Sequence
  Synthetic: rene_0009_ADGRG1
cctgcagcccaccctgcttc

SEQ ID NO: 12 - DNA, 20 bp, Artificial Sequence
  Synthetic: rene_0010_ADGRG1
gtgttctgtaccacaatccc

SEQ ID NO: 13 - DNA, 20 bp, Artificial Sequence
  Synthetic: rene_0011_ADGRG1
tctcctgacggtctcacacc

SEQ ID NO: 14 - DNA, 20 bp, Artificial Sequence
  Synthetic: rene_0012_ADGRG1
ggtttctctcctgacggtct

SEQ ID NO: 15 - DNA, 20 bp, Artificial Sequence
  Synthetic: rene_0013_ADGRG1
tgttcaacatggccatgcta

SEQ ID NO: 16 - DNA, 20 bp, Artificial Sequence
  Synthetic: rene_0014_ADGRG1
gcttctgcagccagcggaac

SEQ ID NO: 17 - DNA, 20 bp, Artificial Sequence
  Synthetic: rene_0015_ADGRG1
ggtgtgggggcgcagccgca

SEQ ID NO: 18 - DNA, 20 bp, Artificial Sequence
  Synthetic: rene_0016_ADGRG1
agctcgcacatgtccaccga

SEQ ID NO: 19 - DNA, 20 bp, Artificial Sequence
  Synthetic: rene_0017_ADRB3
gatgctggcggtcacacaca

SEQ ID NO: 20 - DNA, 20 bp, Artificial Sequence
  Synthetic: rene_0018_ADRB3
gtggtggctacgcgccagct

SEQ ID NO: 21 - DNA, 20 bp, Artificial Sequence
  Synthetic: rene_0019_ADRB3
cttgccctgaactggctagg

SEQ ID NO: 22 - DNA, 20 bp, Artificial Sequence
  Synthetic: rene_0020_ADRB3
gcagcgccttccgccgtctt

SEQ ID NO: 23 - DNA, 20 bp, Artificial Sequence
  Synthetic: rene_0021_ADRB3
cgcccatcatgagccagtgg

SEQ ID NO: 24 - DNA, 20 bp, Artificial Sequence
  Synthetic: rene_0022_ADRB3
tggccaacgtgctgcgcgcc

SEQ ID NO: 25 - DNA, 20 bp, Artificial Sequence
  Synthetic: rene_0023_ADRB3
cgcccgaggagtctccgccg

SEQ ID NO: 26 - DNA, 20 bp, Artificial Sequence
  Synthetic: rene_0024_AEBP2
gggaagggacacagtgttgt

SEQ ID NO: 27 - DNA, 20 bp, Artificial Sequence
  Synthetic: rene_0025_AEBP2
actgatgtcgttcactttca

SEQ ID NO: 28 - DNA, 20 bp, Artificial Sequence
  Synthetic: rene_0026_AEBP2
ggtccaaaagcaaggcagta

SEQ ID NO: 29 - DNA, 20 bp, Artificial Sequence
  Synthetic: rene_0027_AEBP2
actggtagatggagtgttat

SEQ ID NO: 30 - DNA, 20 bp, Artificial Sequence
  Synthetic: rene_0028_AEBP2
cttgaagaagtagtgcttcc

SEQ ID NO: 31 - DNA, 20 bp, Artificial Sequence
  Synthetic: rene_0029_AEBP2
tagccagccaaaggccaaag

SEQ ID NO: 32 - DNA, 20 bp, Artificial Sequence
  Synthetic: rene_0030_AEBP2
tatatgagctgagaggttaa

SEQ ID NO: 33 - DNA, 20 bp, Artificial Sequence
  Synthetic: rene_0031_AEBP2
acctctcagctcatatagaa

SEQ ID NO: 34 - DNA, 20 bp, Artificial Sequence
  Synthetic: rene_0032_AGFG1
cccacagcaagtcactctcc

SEQ ID NO: 35 - DNA, 20 bp, Artificial Sequence
  Synthetic: rene_0033_AGFG1
cagactgcagacaaatatgc

SEQ ID NO: 36 - DNA, 20 bp, Artificial Sequence
  Synthetic: rene_0034_AGFG1
gaggtttccccacagcaagt

SEQ ID NO: 37 - DNA, 20 bp, Artificial Sequence
  Synthetic: rene_0035_AGFG1
agaccaatgccagaggagca

SEQ ID NO: 38 - DNA, 20 bp, Artificial Sequence
  Synthetic: rene_0036_AGFG1
cctgtggtcccaaagccact

SEQ ID NO: 39 - DNA, 20 bp, Artificial Sequence
  Synthetic: rene_0037_AGFG1
caacaggaagctcatcaacc

SEQ ID NO: 40 - DNA, 20 bp, Artificial Sequence
  Synthetic: rene_0038_AGFG1
agttctgcagccacctccag

SEQ ID NO: 41 - DNA, 20 bp, Artificial Sequence
  Synthetic: rene_0039_AGFG1
ggaccacaggtaaagctcct

SEQ ID NO: 42 - DNA, 20 bp, Artificial Sequence
  Synthetic: rene_0040_AHR
agagaaggcctgaacttaca

SEQ ID NO: 43 - DNA, 20 bp, Artificial Sequence
  Synthetic: rene_0041_AHR
ggatatactgaagcagagct

SEQ ID NO: 44 - DNA, 20 bp, Artificial Sequence
  Synthetic: rene_0042_AHR
aatgaaacatatccagctga

SEQ ID NO: 45 - DNA, 20 bp, Artificial Sequence
  Synthetic: rene_0043_AHR
gaaccaaacacaaactagac

SEQ ID NO: 46 - DNA, 20 bp, Artificial Sequence
  Synthetic: rene_0044_AHR
gctagcctgctgcctttccc

SEQ ID NO: 47 - DNA, 20 bp, Artificial Sequence
  Synthetic: rene_0045_AHR
attatgctgtacaagtcact

SEQ ID NO: 48 - DNA, 20 bp, Artificial Sequence
  Synthetic: rene_0046_AHR
ctgtaatcagcctgtattac

SEQ ID NO: 49 - DNA, 20 bp, Artificial Sequence
  Synthetic: rene_0047_AHR
taagaagccggaaaactatc

SEQ ID NO: 50 - DNA, 20 bp, Artificial Sequence
  Synthetic: rene_0048_AKAP1
gcttcaccacctgtcagggc

SEQ ID NO: 51 - DNA, 20 bp, Artificial Sequence
  Synthetic: rene_0049_AKAP1
accggaagcagatgccgcca

SEQ ID NO: 52 - DNA, 20 bp, Artificial Sequence
  Synthetic: rene_0050_AKAP1
agggagcagaagtccttctg

SEQ ID NO: 53 - DNA, 20 bp, Artificial Sequence
  Synthetic: rene_0051_AKAP1
cgagagaaaaaccaccacca

SEQ ID NO: 54 - DNA, 20 bp, Artificial Sequence
  Synthetic: rene_0052_AKAP1
tggtgaactgggacacagct

SEQ ID NO: 55 - DNA, 20 bp, Artificial Sequence
  Synthetic: rene_0053_AKAP1
ctggagaatagtacaccctt

SEQ ID NO: 56 - DNA, 20 bp, Artificial Sequence
  Synthetic: rene_0054_AKAP1
ccccaacacggcatcaccag

SEQ ID NO: 57 - DNA, 20 bp, Artificial Sequence
  Synthetic: rene_0055_AKAP1
gagggggaagaagataaggg

SEQ ID NO: 58 - DNA, 20 bp, Artificial Sequence
  Synthetic: rene_0056_AKT1
tgcagccaaccctccttcac

SEQ ID NO: 59 - DNA, 20 bp, Artificial Sequence
  Synthetic: rene_0057_AKT1
agctcatcctcatggaggag

SEQ ID NO: 60 - DNA, 20 bp, Artificial Sequence
  Synthetic: rene_0058_AKT1
atgaggagttcacggcccag

SEQ ID NO: 61 - DNA, 20 bp, Artificial Sequence
  Synthetic: rene_0059_AKT1
agtacctgaagctgctgggc

SEQ ID NO: 62 - DNA, 20 bp, Artificial Sequence
  Synthetic: rene_0060_AKT1
agggctgctcaagaaggacc

SEQ ID NO: 63 - DNA, 20 bp, Artificial Sequence
  Synthetic: rene_0061_AKT1
ggcaaggtgatcctggtgaa

SEQ ID NO: 64 - DNA, 20 bp, Artificial Sequence
  Synthetic: rene_0062_AKT1
cagacccacgaccgcctctg

SEQ ID NO: 65 - DNA, 20 bp, Artificial Sequence
  Synthetic: rene_0063_AKT1
ccggtatcgtgtggcagcac

SEQ ID NO: 66 - DNA, 20 bp, Artificial Sequence
  Synthetic: rene_0064_ARHGEF15
ggggaccccccacagccaga

SEQ ID NO: 67 - DNA, 20 bp, Artificial Sequence
  Synthetic: rene_0065_ARHGEF15
ggggcagccctggactccag

SEQ ID NO: 68 - DNA, 20 bp, Artificial Sequence
  Synthetic: rene_0066_ARHGEF15
gtgttcccctgtgacttcac

SEQ ID NO: 69 - DNA, 20 bp, Artificial Sequence
  Synthetic: rene_0067_ARHGEF15
ctggagaaggactcccatcc

SEQ ID NO: 70 - DNA, 20 bp, Artificial Sequence
  Synthetic: rene_0068_ARHGEF15
gattccatcttcagaaagca

SEQ ID NO: 71 - DNA, 20 bp, Artificial Sequence
  Synthetic: rene_0069_ARHGEF15
ggtgagccggatcagctctt

SEQ ID NO: 72 - DNA, 20 bp, Artificial Sequence
  Synthetic: rene_0070_ARHGEF15
gcgacctgctgctcatcact

SEQ ID NO: 73 - DNA, 20 bp, Artificial Sequence
  Synthetic: rene_0071_ARHGEF15
gaggtggtgacgtccgaggc

SEQ ID NO: 74 - DNA, 20 bp, Artificial Sequence
  Synthetic: rene_0072_ARID4A
attccctcagatccaataca

SEQ ID NO: 75 - DNA, 20 bp, Artificial Sequence
  Synthetic: rene_0073_ARID4A
gaatcaataaatgatcgaac

SEQ ID NO: 76 - DNA, 20 bp, Artificial Sequence
  Synthetic: rene_0074_ARID4A
cattgtaggaagcagctgaa

SEQ ID NO: 77 - DNA, 20 bp, Artificial Sequence
  Synthetic: rene_0075_ARID4A
gtggagagctcagattccgg

SEQ ID NO: 78 - DNA, 20 bp, Artificial Sequence
  Synthetic: rene_0076_ARID4A
atagtcatcatctacatcct

SEQ ID NO: 79 - DNA, 20 bp, Artificial Sequence
  Synthetic: rene_0077_ARID4A
gctgcagcacttgttcgctt

SEQ ID NO: 80 - DNA, 20 bp, Artificial Sequence
  Synthetic: rene_0078_ARID4A
tatggaccttggcattccta

SEQ ID NO: 81 - DNA, 20 bp, Artificial Sequence
  Synthetic: rene_0079_ARID4A
acttctgcctctcctcatct

SEQ ID NO: 82 - DNA, 20 bp, Artificial Sequence
  Synthetic: rene_0080_ARID4B
gtaatatccaaaccagtgtc

SEQ ID NO: 83 - DNA, 20 bp, Artificial Sequence
  Synthetic: rene_0081_ARID4B
gatatccaagtacaggtcgt

SEQ ID NO: 84 - DNA, 20 bp, Artificial Sequence
  Synthetic: rene_0082_ARID4B
ctatcatcctcatcttcatc

SEQ ID NO: 85 - DNA, 20 bp, Artificial Sequence
  Synthetic: rene_0083_ARID4B
cctcgtccataccgcacttg

SEQ ID NO: 86 - DNA, 20 bp, Artificial Sequence
  Synthetic: rene_0084_ARID4B
gaggaaaaaagaaaatctct

SEQ ID NO: 87 - DNA, 20 bp, Artificial Sequence
  Synthetic: rene_0085_ARID4B
ctgatcagaatgtgtaggta

SEQ ID NO: 88 - DNA, 20 bp, Artificial Sequence
  Synthetic: rene_0086_ARID4B
aggagtactgtagatcagcc

SEQ ID NO: 89 - DNA, 20 bp, Artificial Sequence
  Synthetic: rene_0087_ARID4B
aaaggaggaacagaacagtt

SEQ ID NO: 90 - DNA, 20 bp, Artificial Sequence
  Synthetic: rene_0088_ART3
gctgaatatgccaaggtaaa

SEQ ID NO: 91 - DNA, 20 bp, Artificial Sequence
  Synthetic: rene_0089_ART3
aggataaccatggaatagcc

SEQ ID NO: 92 - DNA, 20 bp, Artificial Sequence
  Synthetic: rene_0090_ART3
ccttggcatattcagccaaa

SEQ ID NO: 93 - DNA, 20 bp, Artificial Sequence
  Synthetic: rene_0091_ART3
ccacacagtatctaattgct

SEQ ID NO: 94 - DNA, 20 bp, Artificial Sequence
  Synthetic: rene_0092_ART3
gccctccaaatgtaaatgaa

SEQ ID NO: 95 - DNA, 20 bp, Artificial Sequence
  Synthetic: rene_0093_ART3
aacccatctatgtctacaac

SEQ ID NO: 96 - DNA, 20 bp, Artificial Sequence
  Synthetic: rene_0094_ART3
cctcacaagagccctgcagt

SEQ ID NO: 97 - DNA, 20 bp, Artificial Sequence
  Synthetic: rene_0095_ART3
cccgaggatgcagaaggatg

SEQ ID NO: 98 - DNA, 20 bp, Artificial Sequence
  Synthetic: rene_0096_ASH1L
ggaccaagaatacatgatgc

SEQ ID NO: 99 - DNA, 20 bp, Artificial Sequence
  Synthetic: rene_0097_ASH1L
gtgaagtgtcctgtgcagaa

SEQ ID NO: 100 - DNA, 20 bp, Artificial Sequence
  Synthetic: rene_0098_ASH1L
actgatgcacagcaacagtt

SEQ ID NO: 101 - DNA, 20 bp, Artificial Sequence
  Synthetic: rene_0099_ASH1L
gcggtagatacatcagaagc

SEQ ID NO: 102 - DNA, 20 bp, Artificial Sequence
  Synthetic: rene_0100_ASH1L
actatcagctaagagagcaa

SEQ ID NO: 103 - DNA, 20 bp, Artificial Sequence
  Synthetic: rene_0101_ASH1L
atgtagctcactatcaaata

SEQ ID NO: 104 - DNA, 20 bp, Artificial Sequence
  Synthetic: rene_0102_ASH1L
aagtccggagaagtgcaata

SEQ ID NO: 105 - DNA, 20 bp, Artificial Sequence
  Synthetic: rene_0103_ASH1L
actgggttcctcagagagat

SEQ ID NO: 106 - DNA, 20 bp, Artificial Sequence
  Synthetic: rene_0104_ASXL1
ccttaagaggaccccccaca

SEQ ID NO: 107 - DNA, 20 bp, Artificial Sequence
  Synthetic: rene_0105_ASXL1
actccctccatccagtgaca

SEQ ID NO: 108 - DNA, 20 bp, Artificial Sequence
  Synthetic: rene_0106_ASXL1
ctgaggcaggctaggaattc

SEQ ID NO: 109 - DNA, 20 bp, Artificial Sequence
  Synthetic: rene_0107_ASXL1
cagaagggcaagtccatgac

SEQ ID NO: 110 - DNA, 20 bp, Artificial Sequence
  Synthetic: rene_0108_ASXL1
ccaggaagtggtgccagact

SEQ ID NO: 111 - DNA, 20 bp, Artificial Sequence
  Synthetic: rene_0109_ASXL1
ccttcagaggagtcaggaca

SEQ ID NO: 112 - DNA, 20 bp, Artificial Sequence
  Synthetic: rene_0110_ASXL1
aatgtccacctgttgacagt

SEQ ID NO: 113 - DNA, 20 bp, Artificial Sequence
  Synthetic: rene_0111_ASXL1
gtgcgagccacagtgcatca

SEQ ID NO: 114 - DNA, 20 bp, Artificial Sequence
  Synthetic: rene_0112_ASXL3
ctatgaccagaatgaaatga

SEQ ID NO: 115 - DNA, 20 bp, Artificial Sequence
  Synthetic: rene_0113_ASXL3
agtgctagatacctcagaac

SEQ ID NO: 116 - DNA, 20 bp, Artificial Sequence
  Synthetic: rene_0114_ASXL3
tgaggaggctgaaagtctaa

SEQ ID NO: 117 - DNA, 20 bp, Artificial Sequence
  Synthetic: rene_0115_ASXL3
cttgaacccgagtgagtaac

SEQ ID NO: 118 - DNA, 20 bp, Artificial Sequence
  Synthetic: rene_0116_ASXL3
acaggaagagcaacatttgt

SEQ ID NO: 119 - DNA, 20 bp, Artificial Sequence
  Synthetic: rene_0117_ASXL3
agaaggctctagaaataaaa

SEQ ID NO: 120 - DNA, 20 bp, Artificial Sequence
  Synthetic: rene_0118_ASXL3
ctggaaacatgctgacaata

SEQ ID NO: 121 - DNA, 20 bp, Artificial Sequence
  Synthetic: rene_0119_ASXL3
agaagaggtagatgaaacaa

SEQ ID NO: 122 - DNA, 20 bp, Artificial Sequence
  Synthetic: rene_0120_ATAD2
gaggtagctatgcaaaagat

SEQ ID NO: 123 - DNA, 20 bp, Artificial Sequence
  Synthetic: rene_0121_ATAD2
gagttagtactacatcccct

SEQ ID NO: 124 - DNA, 20 bp, Artificial Sequence
  Synthetic: rene_0122_ATAD2
ctgtatatacattagacatt

SEQ ID NO: 125 - DNA, 20 bp, Artificial Sequence
  Synthetic: rene_0123_ATAD2
gaggtactcccagtagcacc

SEQ ID NO: 126 - DNA, 20 bp, Artificial Sequence
  Synthetic: rene_0124_ATAD2
gaagccctgcagagagtatt

SEQ ID NO: 127 - DNA, 20 bp, Artificial Sequence
  Synthetic: rene_0125_ATAD2
ccctctgctgtccaatccat

SEQ ID NO: 128 - DNA, 20 bp, Artificial Sequence
  Synthetic: rene_0126_ATAD2
atgtccagttaccggataaa

SEQ ID NO: 129 - DNA, 20 bp, Artificial Sequence
  Synthetic: rene_0127_ATAD2
gaagagctagcagaaaactg

SEQ ID NO: 130 - DNA, 20 bp, Artificial Sequence
  Synthetic: rene_0128_ATAD2
gaggtagctatgcaaaagat

SEQ ID NO: 131 - DNA, 20 bp, Artificial Sequence
  Synthetic: rene_0129_ATAD2
gagttagtactacatcccct

SEQ ID NO: 132 - DNA, 20 bp, Artificial Sequence
  Synthetic: rene_0130_ATAD2
ctgtatatacattagacatt

SEQ ID NO: 133 - DNA, 20 bp, Artificial Sequence
  Synthetic: rene_0131_ATAD2
gaggtactcccagtagcacc

SEQ ID NO: 134 - DNA, 20 bp, Artificial Sequence
  Synthetic: rene_0132_ATAD2
gaagccctgcagagagtatt

SEQ ID NO: 135 - DNA, 20 bp, Artificial Sequence
  Synthetic: rene_0133_ATAD2
ccctctgctgtccaatccat

SEQ ID NO: 136 - DNA, 20 bp, Artificial Sequence
  Synthetic: rene_0134_ATAD2
atgtccagttaccggataaa

SEQ ID NO: 137 - DNA, 20 bp, Artificial Sequence
  Synthetic: rene_0135_ATAD2
gaagagctagcagaaaactg

SEQ ID NO: 138 - DNA, 20 bp, Artificial Sequence
  Synthetic: rene_0136_ATAD2B
gctggaggagatacgtggct

SEQ ID NO: 139 - DNA, 20 bp, Artificial Sequence
  Synthetic: rene_0137_ATAD2B
agaggtagacaataaaaata

SEQ ID NO: 140 - DNA, 20 bp, Artificial Sequence
  Synthetic: rene_0138_ATAD2B
gaggatagtgaagatgaaaa

SEQ ID NO: 141 - DNA, 20 bp, Artificial Sequence
  Synthetic: rene_0139_ATAD2B
actgacagcttcccaccaat

SEQ ID NO: 142 - DNA, 20 bp, Artificial Sequence
  Synthetic: rene_0140_ATAD2B
cctgtgccaggagggccata

SEQ ID NO: 143 - DNA, 20 bp, Artificial Sequence
  Synthetic: rene_0141_ATAD2B
ctgtcctccgtatggttctc

SEQ ID NO: 144 - DNA, 20 bp, Artificial Sequence
  Synthetic: rene_0142_ATAD2B
agtgatagccacgtatctcc

SEQ ID NO: 145 - DNA, 20 bp, Artificial Sequence
  Synthetic: rene_0143_ATAD2B
gtgaagctcgaagaacagta

SEQ ID NO: 146 - DNA, 20 bp, Artificial Sequence
  Synthetic: rene_0144_ATAT1
gaatgaacctggcgttgagt

SEQ ID NO: 147 - DNA, 20 bp, Artificial Sequence
  Synthetic: rene_0145_ATAT1
catccatgagtctgtgcaac

SEQ ID NO: 148 - DNA, 20 bp, Artificial Sequence
  Synthetic: rene_0146_ATAT1
atcaaagttggatacaagaa

SEQ ID NO: 149 - DNA, 20 bp, Artificial Sequence
  Synthetic: rene_0147_ATAT1
ggggccaaggaggctccaca

SEQ ID NO: 150 - DNA, 20 bp, Artificial Sequence
  Synthetic: rene_0148_ATAT1
ctgttctccctgcttggagt

SEQ ID NO: 151 - DNA, 20 bp, Artificial Sequence
  Synthetic: rene_0149_ATAT1
aaggtggcacactccctcct

SEQ ID NO: 152 - DNA, 20 bp, Artificial Sequence
  Synthetic: rene_0150_ATAT1
atgaaaccaataatggctcc

SEQ ID NO: 153 - DNA, 20 bp, Artificial Sequence
  Synthetic: rene_0151_ATAT1
cgctcctatcactagtgcat

SEQ ID NO: 154 - DNA, 20 bp, Artificial Sequence
  Synthetic: rene_0152_ATF1
tgtgaggagcctatgctgtc

SEQ ID NO: 155 - DNA, 20 bp, Artificial Sequence
  Synthetic: rene_0153_ATF1
tgccccgtgtatcttcagaa

SEQ ID NO: 156 - DNA, 20 bp, Artificial Sequence
  Synthetic: rene_0154_ATF1
aattgggggtcatctgtctt

SEQ ID NO: 157 - DNA, 20 bp, Artificial Sequence
  Synthetic: rene_0155_ATF1
ttggaataaagatccttcaa

SEQ ID NO: 158 - DNA, 20 bp, Artificial Sequence
  Synthetic: rene_0156_ATF1
aaagacttatcttctgaaga

SEQ ID NO: 159 - DNA, 20 bp, Artificial Sequence
  Synthetic: rene_0157_ATF1
tgctgctgtcacttctatgt

SEQ ID NO: 160 - DNA, 20 bp, Artificial Sequence
  Synthetic: rene_0158_ATF1
tcagaaagtgaggagtccca

SEQ ID NO: 161 - DNA, 20 bp, Artificial Sequence
  Synthetic: rene_0159_ATF1
caggactgcaactcggtttt

SEQ ID NO: 162 - DNA, 20 bp, Artificial Sequence
  Synthetic: rene_0160_BAZ1A
gtggatacctgaggatcttg

SEQ ID NO: 163 - DNA, 20 bp, Artificial Sequence
  Synthetic: rene_0161_BAZ1A
gatgaagatgcagaccccac

SEQ ID NO: 164 - DNA, 20 bp, Artificial Sequence
  Synthetic: rene_0162_BAZ1A
ctacaagagcttcctctaat

SEQ ID NO: 165 - DNA, 20 bp, Artificial Sequence
  Synthetic: rene_0163_BAZ1A
gaagtcctccctccatcaca

SEQ ID NO: 166 - DNA, 20 bp, Artificial Sequence
  Synthetic: rene_0164_BAZ1A
ggaggtctccctcttcgtct

SEQ ID NO: 167 - DNA, 20 bp, Artificial Sequence
  Synthetic: rene_0165_BAZ1A
ccttctattcctggactctt

SEQ ID NO: 168 - DNA, 20 bp, Artificial Sequence
  Synthetic: rene_0166_BAZ1A
acaatagcagactcatgtaa

SEQ ID NO: 169 - DNA, 20 bp, Artificial Sequence
  Synthetic: rene_0167_BAZ1A
ggtgtgctctgctgactcct

SEQ ID NO: 170 - DNA, 20 bp, Artificial Sequence
  Synthetic: rene_0168_BAZ1B
ctgataggcttgctgaagat

SEQ ID NO: 171 - DNA, 20 bp, Artificial Sequence
  Synthetic: rene_0169_BAZ1B
gtggtgaactaagagaagag

SEQ ID NO: 172 - DNA, 20 bp, Artificial Sequence
  Synthetic: rene_0170_BAZ1B
ccagatgctcagtatcctat

SEQ ID NO: 173 - DNA, 20 bp, Artificial Sequence
  Synthetic: rene_0171_BAZ1B
tgcggacatatcccacttga

SEQ ID NO: 174 - DNA, 20 bp, Artificial Sequence
  Synthetic: rene_0172_BAZ1B
gtgggcgctctgtacgaatc

SEQ ID NO: 175 - DNA, 20 bp, Artificial Sequence
  Synthetic: rene_0173_BAZ1B
ggtgtggttgtctctacagc

SEQ ID NO: 176 - DNA, 20 bp, Artificial Sequence
  Synthetic: rene_0174_BAZ1B
ctagaggtcctaggtgtacc

SEQ ID NO: 177 - DNA, 20 bp, Artificial Sequence
  Synthetic: rene_0175_BAZ1B
cctaacccattctcaacttt

SEQ ID NO: 178 - DNA, 20 bp, Artificial Sequence
  Synthetic: rene_0176_BAZ2A
acctccccacagacttctcc

SEQ ID NO: 179 - DNA, 20 bp, Artificial Sequence
  Synthetic: rene_0177_BAZ2A
tgaggaccaacccactccct

SEQ ID NO: 180 - DNA, 20 bp, Artificial Sequence
  Synthetic: rene_0178_BAZ2A
ctgtagctggacatactctc

SEQ ID NO: 181 - DNA, 20 bp, Artificial Sequence
  Synthetic: rene_0179_BAZ2A
gatgatccttcacatcttcc

SEQ ID NO: 182 - DNA, 20 bp, Artificial Sequence
  Synthetic: rene_0180_BAZ2A
actatcatctgccaggagac

SEQ ID NO: 183 - DNA, 20 bp, Artificial Sequence
  Synthetic: rene_0181_BAZ2A
cctgataaaactcctcccag

SEQ ID NO: 184 - DNA, 20 bp, Artificial Sequence
  Synthetic: rene_0182_BAZ2A
aatggggatgtgaatgttaa

SEQ ID NO: 185 - DNA, 20 bp, Artificial Sequence
  Synthetic: rene_0183_BAZ2A
gggatgtcactgaagccgtc

SEQ ID NO: 186 - DNA, 20 bp, Artificial Sequence
  Synthetic: rene_0184_BAZ2B
aactgtccccagaagtctca

SEQ ID NO: 187 - DNA, 20 bp, Artificial Sequence
  Synthetic: rene_0185_BAZ2B
gtaagaactgcaccaccatg

SEQ ID NO: 188 - DNA, 20 bp, Artificial Sequence
  Synthetic: rene_0186_BAZ2B
ggtctgaaataccatgtaat

SEQ ID NO: 189 - DNA, 20 bp, Artificial Sequence
  Synthetic: rene_0187_BAZ2B
acaggagatactgaagatga

SEQ ID NO: 190 - DNA, 20 bp, Artificial Sequence
  Synthetic: rene_0188_BAZ2B
gggacacttggtacacccac

SEQ ID NO: 191 - DNA, 20 bp, Artificial Sequence
  Synthetic: rene_0189_BAZ2B
gtagtaagtgctagaggagc

SEQ ID NO: 192 - DNA, 20 bp, Artificial Sequence
  Synthetic: rene_0190_BAZ2B
ccttctaccacccatttatc

SEQ ID NO: 193 - DNA, 20 bp, Artificial Sequence
  Synthetic: rene_0191_BAZ2B
gaagtagctaagatgcctcc

SEQ ID NO: 194 - DNA, 20 bp, Artificial Sequence
  Synthetic: rene_0192_BCAN
ggtcttcagcataacagtac

SEQ ID NO: 195 - DNA, 20 bp, Artificial Sequence
  Synthetic: rene_0193_BCAN
gcagatgttctggaaggaga

SEQ ID NO: 196 - DNA, 20 bp, Artificial Sequence
  Synthetic: rene_0194_BCAN
tcttcttcctccaatgcctt

SEQ ID NO: 197 - DNA, 20 bp, Artificial Sequence
  Synthetic: rene_0195_BCAN
ttccccctgcagctctgggt

SEQ ID NO: 198 - DNA, 20 bp, Artificial Sequence
  Synthetic: rene_0196_BCAN
accttgacctccacagcgtc

SEQ ID NO: 199 - DNA, 20 bp, Artificial Sequence
  Synthetic: rene_0197_BCAN
tggggcccaggaggcctgtg

SEQ ID NO: 200 - DNA, 20 bp, Artificial Sequence
  Synthetic: rene_0198_BCAN
tctaccgagagggctctgcc

SEQ ID NO: 201 - DNA, 20 bp, Artificial Sequence
  Synthetic: rene_0199_BCAN
aaacacaatccatggtaccg

SEQ ID NO: 202 - DNA, 20 bp, Artificial Sequence
  Synthetic: rene_0200_BCL2
tcctggctgtctctgaagac

SEQ ID NO: 203 - DNA, 20 bp, Artificial Sequence
  Synthetic: rene_0201_BCL2
gccctggtgggagcttgcat

SEQ ID NO: 204 - DNA, 20 bp, Artificial Sequence
  Synthetic: rene_0202_BCL2
ccacggtggtggaggagctc

SEQ ID NO: 205 - DNA, 20 bp, Artificial Sequence
  Synthetic: rene_0203_BCL2
atttctcctggctgtctctg

SEQ ID NO: 206 - DNA, 20 bp, Artificial Sequence
  Synthetic: rene_0204_BCL2
tggaactgtacggccccagc

SEQ ID NO: 207 - DNA, 20 bp, Artificial Sequence
  Synthetic: rene_0205_BCL2
agttcggtggggtcatgtgt

SEQ ID NO: 208 - DNA, 20 bp, Artificial Sequence
  Synthetic: rene_0206_BCLAF3
ctgccaacagcaaccaaatc

SEQ ID NO: 209 - DNA, 20 bp, Artificial Sequence
  Synthetic: rene_0207_BCLAF3
ggtggtttccctcaacctca

SEQ ID NO: 210 - DNA, 20 bp, Artificial Sequence
  Synthetic: rene_0208_BCLAF3
cctcaacctcaaatggtttg

SEQ ID NO: 211 - DNA, 20 bp, Artificial Sequence
  Synthetic: rene_0209_BCLAF3
tatgtataagcctcacagag

SEQ ID NO: 212 - DNA, 20 bp, Artificial Sequence
  Synthetic: rene_0210_BCLAF3
tgatgggagaactcagaagt

SEQ ID NO: 213 - DNA, 20 bp, Artificial Sequence
  Synthetic: rene_0211_BCLAF3
gaggtggcagatgccagccc

SEQ ID NO: 214 - DNA, 20 bp, Artificial Sequence
  Synthetic: rene_0212_BCLAF3
agaaaatatggacacacatc

SEQ ID NO: 215 - DNA, 20 bp, Artificial Sequence
  Synthetic: rene_0213_BCLAF3
actgtaagtgatttcttcct

SEQ ID NO: 216 - DNA, 20 bp, Artificial Sequence
  Synthetic: rene_0214_BPTF
cagtggactcaccagaaacc

SEQ ID NO: 217 - DNA, 20 bp, Artificial Sequence
  Synthetic: rene_0215_BPTF
actgcacactccaaaatggc

SEQ ID NO: 218 - DNA, 20 bp, Artificial Sequence
  Synthetic: rene_0216_BPTF
atctaaggactagttacaaa

SEQ ID NO: 219 - DNA, 20 bp, Artificial Sequence
  Synthetic: rene_0217_BPTF
ggaacaaacctataaacatg

SEQ ID NO: 220 - DNA, 20 bp, Artificial Sequence
  Synthetic: rene_0218_BPTF
atggtgcctaatgagcatat

SEQ ID NO: 221 - DNA, 20 bp, Artificial Sequence
  Synthetic: rene_0219_BPTF
gagtgtgcagttaaaccagt

SEQ ID NO: 222 - DNA, 20 bp, Artificial Sequence
  Synthetic: rene_0220_BPTF
gataagatagataaagaaga

SEQ ID NO: 223 - DNA, 20 bp, Artificial Sequence
  Synthetic: rene_0221_BPTF
tgacaaaccctacaatggtc

SEQ ID NO: 224 - DNA, 20 bp, Artificial Sequence
  Synthetic: rene_0222_BRD1
atgtgatccaaataatctgg

SEQ ID NO: 225 - DNA, 20 bp, Artificial Sequence
  Synthetic: rene_0223_BRD1
ctggggactcctcctccacc

SEQ ID NO: 226 - DNA, 20 bp, Artificial Sequence
  Synthetic: rene_0224_BRD1
aaggaagaggtaatgcatct

SEQ ID NO: 227 - DNA, 20 bp, Artificial Sequence
  Synthetic: rene_0225_BRD1
atgtacaggccagccttctg

SEQ ID NO: 228 - DNA, 20 bp, Artificial Sequence
  Synthetic: rene_0226_BRD1
gtccctagctgaggagaagt

SEQ ID NO: 229 - DNA, 20 bp, Artificial Sequence
  Synthetic: rene_0227_BRD1
atttcgacatccccgtaaat

SEQ ID NO: 230 - DNA, 20 bp, Artificial Sequence
  Synthetic: rene_0228_BRD1
tctgtagtccttccgaggtt

SEQ ID NO: 231 - DNA, 20 bp, Artificial Sequence
  Synthetic: rene_0229_BRD1
cttggctgcagaagagtctc

SEQ ID NO: 232 - DNA, 20 bp, Artificial Sequence
  Synthetic: rene_0230_BRD2
gaatcctcttccctggtgct

SEQ ID NO: 233 - DNA, 20 bp, Artificial Sequence
  Synthetic: rene_0231_BRD2
agagccccacaatggcttcg

SEQ ID NO: 234 - DNA, 20 bp, Artificial Sequence
  Synthetic: rene_0232_BRD2
caacttacccctgccaaccc

SEQ ID NO: 235 - DNA, 20 bp, Artificial Sequence
  Synthetic: rene_0233_BRD2
ggattggacacctccggggg

SEQ ID NO: 236 - DNA, 20 bp, Artificial Sequence
  Synthetic: rene_0234_BRD2
cacagagccttcatcactac

SEQ ID NO: 237 - DNA, 20 bp, Artificial Sequence
  Synthetic: rene_0235_BRD2
acagcatccacaggctgccg

SEQ ID NO: 238 - DNA, 20 bp, Artificial Sequence
  Synthetic: rene_0236_BRD2
ctcttgggcttggatattgg

SEQ ID NO: 239 - DNA, 20 bp, Artificial Sequence
  Synthetic: rene_0237_BRD2
tctcttttcctcttgggctt

SEQ ID NO: 240 - DNA, 20 bp, Artificial Sequence
  Synthetic: rene_0238_BRD3
agagtctcaaagtcaatttc

SEQ ID NO: 241 - DNA, 20 bp, Artificial Sequence
  Synthetic: rene_0239_BRD3
tgtaaacaagacttgacata

SEQ ID NO: 242 - DNA, 20 bp, Artificial Sequence
  Synthetic: rene_0240_BRD3
cagaaaaagcaaaggaaacc

SEQ ID NO: 243 - DNA, 20 bp, Artificial Sequence
  Synthetic: rene_0241_BRD3
cagagcgtcttcaccaccac

SEQ ID NO: 244 - DNA, 20 bp, Artificial Sequence
  Synthetic: rene_0242_BRD3
atcgtagctcatgggcaggc

SEQ ID NO: 245 - DNA, 20 bp, Artificial Sequence
  Synthetic: rene_0243_BRD3
ccaagatgccagatgagccc

SEQ ID NO: 246 - DNA, 20 bp, Artificial Sequence
  Synthetic: rene_0244_BRD3
agagcgtgccccccaccgtc

SEQ ID NO: 247 - DNA, 20 bp, Artificial Sequence
  Synthetic: rene_0245_BRD3
tctaaagcttgggccattag

SEQ ID NO: 248 - DNA, 20 bp, Artificial Sequence
  Synthetic: rene_0246_BRD4
ggaggaggttccttggcttt

SEQ ID NO: 249 - DNA, 20 bp, Artificial Sequence
  Synthetic: rene_0247_BRD4
cacggtaccaaacacaactc

SEQ ID NO: 250 - DNA, 20 bp, Artificial Sequence
  Synthetic: rene_0248_BRD4
cctggactatcatgatctcg

SEQ ID NO: 251 - DNA, 20 bp, Artificial Sequence
  Synthetic: rene_0249_BRD4
cacccacatccaacagcccc

SEQ ID NO: 252 - DNA, 20 bp, Artificial Sequence
  Synthetic: rene_0250_BRD4
gtgctgacgtccgattgatg

SEQ ID NO: 253 - DNA, 20 bp, Artificial Sequence
  Synthetic: rene_0251_BRD4
cagagtgatctattgtcaat

SEQ ID NO: 254 - DNA, 20 bp, Artificial Sequence
  Synthetic: rene_0252_BRD4
tagtccatcccccattactg

SEQ ID NO: 255 - DNA, 20 bp, Artificial Sequence
  Synthetic: rene_0253_BRD4
ccaagaagcacgccgcctac

SEQ ID NO: 256 - DNA, 20 bp, Artificial Sequence
  Synthetic: rene_0254_BRD7
gagagagagcaggagcagct

SEQ ID NO: 257 - DNA, 20 bp, Artificial Sequence
  Synthetic: rene_0255_BRD7
gtaccatgaaagaaaagatc

SEQ ID NO: 258 - DNA, 20 bp, Artificial Sequence
  Synthetic: rene_0256_BRD7
caataaaccagagaccattt

SEQ ID NO: 259 - DNA, 20 bp, Artificial Sequence
  Synthetic: rene_0257_BRD7
gccacgtgccaagattatcc

SEQ ID NO: 260 - DNA, 20 bp, Artificial Sequence
  Synthetic: rene_0258_BRD7
aaagaagaaaaccagatgga

SEQ ID NO: 261 - DNA, 20 bp, Artificial Sequence
  Synthetic: rene_0259_BRD7
tctgtatgagggacccaaga

SEQ ID NO: 262 - DNA, 20 bp, Artificial Sequence
  Synthetic: rene_0260_BRD7
gactccagtactcaagacag

SEQ ID NO: 263 - DNA, 20 bp, Artificial Sequence
  Synthetic: rene_0261_BRD7
agcaccagaccccctccgaa

SEQ ID NO: 264 - DNA, 20 bp, Artificial Sequence
  Synthetic: rene_0262_BRD8
actggaggctcactggcaac

SEQ ID NO: 265 - DNA, 20 bp, Artificial Sequence
  Synthetic: rene_0263_BRD8
cctccagttgcccacatcaa

SEQ ID NO: 266 - DNA, 20 bp, Artificial Sequence
  Synthetic: rene_0264_BRD8
gctggattctgaacaagatc

SEQ ID NO: 267 - DNA, 20 bp, Artificial Sequence
  Synthetic: rene_0265_BRD8
gaagaaagccatcatgcttg

SEQ ID NO: 268 - DNA, 20 bp, Artificial Sequence
  Synthetic: rene_0266_BRD8
gctgaaagctcttcagtctc

SEQ ID NO: 269 - DNA, 20 bp, Artificial Sequence
  Synthetic: rene_0267_BRD8
gaagctggtcctacacagtt

SEQ ID NO: 270 - DNA, 20 bp, Artificial Sequence
  Synthetic: rene_0268_BRD8
gaggcagagactcagcacaa

SEQ ID NO: 271 - DNA, 20 bp, Artificial Sequence
  Synthetic: rene_0269_BRD8
ctgtatctccccaccatgta

SEQ ID NO: 272 - DNA, 20 bp, Artificial Sequence
  Synthetic: rene_0270_BRD9
tgtggatatctccatgctca

SEQ ID NO: 273 - DNA, 20 bp, Artificial Sequence
  Synthetic: rene_0271_BRD9
gcaccatgaaagacaaaatt

SEQ ID NO: 274 - DNA, 20 bp, Artificial Sequence
  Synthetic: rene_0272_BRD9
ctgtcacggatgcaattgct

SEQ ID NO: 275 - DNA, 20 bp, Artificial Sequence
  Synthetic: rene_0273_BRD9
gatgcagaataattcagtat

SEQ ID NO: 276 - DNA, 20 bp, Artificial Sequence
  Synthetic: rene_0274_BRD9
tacttgtactggtacaactt

SEQ ID NO: 277 - DNA, 20 bp, Artificial Sequence
  Synthetic: rene_0275_BRD9
atggtgccaaaatccatggg

SEQ ID NO: 278 - DNA, 20 bp, Artificial Sequence
  Synthetic: rene_0276_BRD9
tgaaggatgctgggagctac

SEQ ID NO: 279 - DNA, 20 bp, Artificial Sequence
  Synthetic: rene_0277_BRD9
aagctgatgtgtgataatgc

SEQ ID NO: 280 - DNA, 20 bp, Artificial Sequence
  Synthetic: rene_0278_BRDT
attacacctgatggtttcac

SEQ ID NO: 281 - DNA, 20 bp, Artificial Sequence
  Synthetic: rene_0279_BRDT
ggcaaaccagtgaaaccatc

SEQ ID NO: 282 - DNA, 20 bp, Artificial Sequence
  Synthetic: rene_0280_BRDT
atgtaacataaaggcatact

SEQ ID NO: 283 - DNA, 20 bp, Artificial Sequence
  Synthetic: rene_0281_BRDT
gcaaggcagaaagaacaaga

SEQ ID NO: 284 - DNA, 20 bp, Artificial Sequence
  Synthetic: rene_0282_BRDT
acagtctgtaaatgttctaa

SEQ ID NO: 285 - DNA, 20 bp, Artificial Sequence
  Synthetic: rene_0283_BRDT
ccagattctcagcaacaata

SEQ ID NO: 286 - DNA, 20 bp, Artificial Sequence
  Synthetic: rene_0284_BRDT
acagcatccacaggacgttg

SEQ ID NO: 287 - DNA, 20 bp, Artificial Sequence
  Synthetic: rene_0285_BRDT
gcagaagaaacagctatatt

SEQ ID NO: 288 - DNA, 20 bp, Artificial Sequence
  Synthetic: rene_0286_BRPF1
ccagaggacagcagtgagga

SEQ ID NO: 289 - DNA, 20 bp, Artificial Sequence
  Synthetic: rene_0287_BRPF1
accatgaagcagaacttgga

SEQ ID NO: 290 - DNA, 20 bp, Artificial Sequence
  Synthetic: rene_0288_BRPF1
tctgagctccagcccttacc

SEQ ID NO: 291 - DNA, 20 bp, Artificial Sequence
  Synthetic: rene_0289_BRPF1
gagaacagaactgaggttct

SEQ ID NO: 292 - DNA, 20 bp, Artificial Sequence
  Synthetic: rene_0290_BRPF1
tgcgagcaccactcccaagc

SEQ ID NO: 293 - DNA, 20 bp, Artificial Sequence
  Synthetic: rene_0291_BRPF1
atgtggtctaggtagtcagg

SEQ ID NO: 294 - DNA, 20 bp, Artificial Sequence
  Synthetic: rene_0292_BRPF1
aggaggacttcaacctcatc

SEQ ID NO: 295 - DNA, 20 bp, Artificial Sequence
  Synthetic: rene_0293_BRPF1
agtgtccgcaagacagccta

SEQ ID NO: 296 - DNA, 20 bp, Artificial Sequence
  Synthetic: rene_0294_BRPF3
ctctgaaaggagagaccact

SEQ ID NO: 297 - DNA, 20 bp, Artificial Sequence
  Synthetic: rene_0295_BRPF3
gtgtctgcagatacctttga

SEQ ID NO: 298 - DNA, 20 bp, Artificial Sequence
  Synthetic: rene_0296_BRPF3
agtgggtcatagatgctgat

SEQ ID NO: 299 - DNA, 20 bp, Artificial Sequence
  Synthetic: rene_0297_BRPF3
accttatagttaccaactgc

SEQ ID NO: 300 - DNA, 20 bp, Artificial Sequence
  Synthetic: rene_0298_BRPF3
ggtctcagtggtggactggc

SEQ ID NO: 301 - DNA, 20 bp, Artificial Sequence
  Synthetic: rene_0299_BRPF3
attcaccatgtccagccagg

SEQ ID NO: 302 - DNA, 20 bp, Artificial Sequence
  Synthetic: rene_0300_BRPF3
tccccagaggtgcagctgaa

SEQ ID NO: 303 - DNA, 20 bp, Artificial Sequence
  Synthetic: rene_0301_BRPF3
tgctctcccagcttcagcac

SEQ ID NO: 304 - DNA, 20 bp, Artificial Sequence
  Synthetic: rene_0302_BRWD1
gatgcagcaaaccatatgaa

SEQ ID NO: 305 - DNA, 20 bp, Artificial Sequence
  Synthetic: rene_0303_BRWD1
gtggggaaccataattcact

SEQ ID NO: 306 - DNA, 20 bp, Artificial Sequence
  Synthetic: rene_0304_BRWD1
gattcagatgatgacaaaat

SEQ ID NO: 307 - DNA, 20 bp, Artificial Sequence
  Synthetic: rene_0305_BRWD1
gccacaggtagtactgatca

SEQ ID NO: 308 - DNA, 20 bp, Artificial Sequence
  Synthetic: rene_0306_BRWD1
gtatcacagtctagacaaag

SEQ ID NO: 309 - DNA, 20 bp, Artificial Sequence
  Synthetic: rene_0307_BRWD1
agtgtgaagattctgaacca

SEQ ID NO: 310 - DNA, 20 bp, Artificial Sequence
  Synthetic: rene_0308_BRWD1
gaggagataaattctcagta

SEQ ID NO: 311 - DNA, 20 bp, Artificial Sequence
  Synthetic: rene_0309_BRWD1
ggatctgtaactgaatcaga

SEQ ID NO: 312 - DNA, 20 bp, Artificial Sequence
  Synthetic: rene_0310_BRWD3
gatgcagtaaatactacgaa

SEQ ID NO: 313 - DNA, 20 bp, Artificial Sequence
  Synthetic: rene_0311_BRWD3
cttacagcccgaacataagc

SEQ ID NO: 314 - DNA, 20 bp, Artificial Sequence
  Synthetic: rene_0312_BRWD3
tcaggaacctcagaacccaa

SEQ ID NO: 315 - DNA, 20 bp, Artificial Sequence
  Synthetic: rene_0313_BRWD3
agtagactgcctcgaattaa

SEQ ID NO: 316 - DNA, 20 bp, Artificial Sequence
  Synthetic: rene_0314_BRWD3
ccttcatctgcttaccagca

SEQ ID NO: 317 - DNA, 20 bp, Artificial Sequence
  Synthetic: rene_0315_BRWD3
gtagccatgtctagcactat

SEQ ID NO: 318 - DNA, 20 bp, Artificial Sequence
  Synthetic: rene_0316_BRWD3
ctgagagatccagacctgga

SEQ ID NO: 319 - DNA, 20 bp, Artificial Sequence
  Synthetic: rene_0317_BRWD3
cctgcacagattctcatgga

SEQ ID NO: 320 - DNA, 20 bp, Artificial Sequence
  Synthetic: rene_0318_BTLA
acagggcattctagttcaaa

SEQ ID NO: 321 - DNA, 20 bp, Artificial Sequence
  Synthetic: rene_0319_BTLA
agtctaatctcattgaaagc

SEQ ID NO: 322 - DNA, 20 bp, Artificial Sequence
  Synthetic: rene_0320_BTLA
ccttcctgctgtgtcagaga

SEQ ID NO: 323 - DNA, 20 bp, Artificial Sequence
  Synthetic: rene_0321_BTLA
tgatagcagtacttgggaat

SEQ ID NO: 324 - DNA, 20 bp, Artificial Sequence
  Synthetic: rene_0322_BTLA
aatgagattagactgaaaat

SEQ ID NO: 325 - DNA, 20 bp, Artificial Sequence
  Synthetic: rene_0323_BTLA
cctggtgcttgcttctgttt

SEQ ID NO: 326 - DNA, 20 bp, Artificial Sequence
  Synthetic: rene_0324_BTLA
tataaagctgtacatcacat

SEQ ID NO: 327 - DNA, 20 bp, Artificial Sequence
  Synthetic: rene_0325_BTLA
aaccagtgcttcctaatgac

SEQ ID NO: 328 - DNA, 20 bp, Artificial Sequence
  Synthetic: rene_0326_BUB1
gataagaagaaataccacaa

SEQ ID NO: 329 - DNA, 20 bp, Artificial Sequence
  Synthetic: rene_0327_BUB1
ctgagaataaagaatacttg

SEQ ID NO: 330 - DNA, 20 bp, Artificial Sequence
  Synthetic: rene_0328_BUB1
tgtacaaccatgggattgga

SEQ ID NO: 331 - DNA, 20 bp, Artificial Sequence
  Synthetic: rene_0329_BUB1
gatgccaaagatgagtgcac

SEQ ID NO: 332 - DNA, 20 bp, Artificial Sequence
  Synthetic: rene_0330_BUB1
atatctatactctgacccag

SEQ ID NO: 333 - DNA, 20 bp, Artificial Sequence
  Synthetic: rene_0331_BUB1
gaacaggatgatgaagatga

SEQ ID NO: 334 - DNA, 20 bp, Artificial Sequence
  Synthetic: rene_0332_BUB1
gtgaacgcttacattctaag

SEQ ID NO: 335 - DNA, 20 bp, Artificial Sequence
  Synthetic: rene_0333_BUB1
gtgtccccagccaccagcca

SEQ ID NO: 336 - DNA, 20 bp, Artificial Sequence
  Synthetic: rene_0334_CA2
atggaatccagcacatcaac

SEQ ID NO: 337 - DNA, 20 bp, Artificial Sequence
  Synthetic: rene_0335_CA2
ctatgatcaagcaacttccc

SEQ ID NO: 338 - DNA, 20 bp, Artificial Sequence
  Synthetic: rene_0336_CA2
tccacagtatgctctgaacc

SEQ ID NO: 339 - DNA, 20 bp, Artificial Sequence
  Synthetic: rene_0337_CA2
ccgtacccccagtgatggga

SEQ ID NO: 340 - DNA, 20 bp, Artificial Sequence
  Synthetic: rene_0338_CA2
gtgttccagtgaaccaagtg

SEQ ID NO: 341 - DNA, 20 bp, Artificial Sequence
  Synthetic: rene_0339_CA2
actggggttcacttgatgga

SEQ ID NO: 342 - DNA, 20 bp, Artificial Sequence
  Synthetic: rene_0340_CA2
tcctgagagtcatcaaactc

SEQ ID NO: 343 - DNA, 20 bp, Artificial Sequence
  Synthetic: rene_0341_CA2
ggaaagctgtgcagcaacct

SEQ ID NO: 344 - DNA, 20 bp, Artificial Sequence
  Synthetic: rene_0342_CALU
actataaacagatgatggtt

SEQ ID NO: 345 - DNA, 20 bp, Artificial Sequence
  Synthetic: rene_0343_CALU
ctgggaggagtataaaaatg

SEQ ID NO: 346 - DNA, 20 bp, Artificial Sequence
  Synthetic: rene_0344_CALU
ccttgagcaaacccacagaa

SEQ ID NO: 347 - DNA, 20 bp, Artificial Sequence
  Synthetic: rene_0345_CALU
atatgaatcaagacggctta

SEQ ID NO: 348 - DNA, 20 bp, Artificial Sequence
  Synthetic: rene_0346_CALU
cgaggatgtagagcgacagt

SEQ ID NO: 349 - DNA, 20 bp, Artificial Sequence
  Synthetic: rene_0347_CALU
agctccccctccgtcacaaa

SEQ ID NO: 350 - DNA, 20 bp, Artificial Sequence
  Synthetic: rene_0348_CALU
tgtactcatcccaggagatt

SEQ ID NO: 351 - DNA, 20 bp, Artificial Sequence
  Synthetic: rene_0349_CALU
gggataagaaccgtgatggg

SEQ ID NO: 352 - DNA, 20 bp, Artificial Sequence
  Synthetic: rene_0350_CARD11
gattaagcactgcgagtact

SEQ ID NO: 353 - DNA, 20 bp, Artificial Sequence
  Synthetic: rene_0351_CARD11
tctccagcttacattcctcc

SEQ ID NO: 354 - DNA, 20 bp, Artificial Sequence
  Synthetic: rene_0352_CARD11
attctcccgctccagttcca

SEQ ID NO: 355 - DNA, 20 bp, Artificial Sequence
  Synthetic: rene_0353_CARD11
cagagagaacttcctgaaca

SEQ ID NO: 356 - DNA, 20 bp, Artificial Sequence
  Synthetic: rene_0354_CARD11
gagactgatttctctccagc

SEQ ID NO: 357 - DNA, 20 bp, Artificial Sequence
  Synthetic: rene_0355_CARD11
acagaccatgacctggatat

SEQ ID NO: 358 - DNA, 20 bp, Artificial Sequence
  Synthetic: rene_0356_CARD11
gggatgccagccccaggacc

SEQ ID NO: 359 - DNA, 20 bp, Artificial Sequence
  Synthetic: rene_0357_CARD11
ccgggggctcggcggtgatt

SEQ ID NO: 360 - DNA, 20 bp, Artificial Sequence
  Synthetic: rene_0358_CARM1
tggctacctgtcccagcagc

SEQ ID NO: 361 - DNA, 20 bp, Artificial Sequence
  Synthetic: rene_0359_CARM1
aggatgttgtagaaggaaca

SEQ ID NO: 362 - DNA, 20 bp, Artificial Sequence
  Synthetic: rene_0360_CARM1
ctaccattggtgacgtccac

SEQ ID NO: 363 - DNA, 20 bp, Artificial Sequence
  Synthetic: rene_0361_CARM1
tgttccttctacaacatcct

SEQ ID NO: 364 - DNA, 20 bp, Artificial Sequence
  Synthetic: rene_0362_CARM1
agatccaggaggttactgga

SEQ ID NO: 365 - DNA, 20 bp, Artificial Sequence
  Synthetic: rene_0363_CARM1
cgagggagatgtgtagtggg

SEQ ID NO: 366 - DNA, 20 bp, Artificial Sequence
  Synthetic: rene_0364_CARM1
agtgctcagtgtcccgagag

SEQ ID NO: 367 - DNA, 20 bp, Artificial Sequence
  Synthetic: rene_0365_CARM1
ccgcccaagctggagcacgg

SEQ ID NO: 368 - DNA, 20 bp, Artificial Sequence
  Synthetic: rene_0366_CASP3
atgcaaagaaacagattcca

SEQ ID NO: 369 - DNA, 20 bp, Artificial Sequence
  Synthetic: rene_0367_CASP3
tgtataataattaataataa

SEQ ID NO: 370 - DNA, 20 bp, Artificial Sequence
  Synthetic: rene_0368_CASP3
agaggggatcgttgtagaag

SEQ ID NO: 371 - DNA, 20 bp, Artificial Sequence
  Synthetic: rene_0369_CASP3
cctgaggtttgctgcatcga

SEQ ID NO: 372 - DNA, 20 bp, Artificial Sequence
  Synthetic: rene_0370_CASP3
gaacaaatggacctgttgac

SEQ ID NO: 373 - DNA, 20 bp, Artificial Sequence
  Synthetic: rene_0371_CASP3
catgctcacaaaagaactct

SEQ ID NO: 374 - DNA, 20 bp, Artificial Sequence
  Synthetic: rene_0372_CASP3
tgacacgccatgtcatcatc

SEQ ID NO: 375 - DNA, 20 bp, Artificial Sequence
  Synthetic: rene_0373_CASP3
aggtcaacaggtccatttgt

SEQ ID NO: 376 - DNA, 20 bp, Artificial Sequence
  Synthetic: rene_0374_CAV1
gaaggccagcttcaccacct

SEQ ID NO: 377 - DNA, 20 bp, Artificial Sequence
  Synthetic: rene_0375_CAV1
ccaacagcttcaaagagtgg

SEQ ID NO: 378 - DNA, 20 bp, Artificial Sequence
  Synthetic: rene_0376_CAV1
aagatgtgattgcagaacca

SEQ ID NO: 379 - DNA, 20 bp, Artificial Sequence
  Synthetic: rene_0377_CAV1
gcatcccgatggcactcatc

SEQ ID NO: 380 - DNA, 20 bp, Artificial Sequence
  Synthetic: rene_0378_CAV1
gtcacagtgaaggtggtgaa

SEQ ID NO: 381 - DNA, 20 bp, Artificial Sequence
  Synthetic: rene_0379_CAV1
ccgcttgctgtctgccctct

SEQ ID NO: 382 - DNA, 20 bp, Artificial Sequence
  Synthetic: rene_0380_CAV1
ctgcacatctgggcagttgt

SEQ ID NO: 383 - DNA, 20 bp, Artificial Sequence
  Synthetic: rene_0381_CAV1
cttcgccattctctctttcc

SEQ ID NO: 384 - DNA, 20 bp, Artificial Sequence
  Synthetic: rene_0382_CBX1
tgtgactgcagaaactcagc

SEQ ID NO: 385 - DNA, 20 bp, Artificial Sequence
  Synthetic: rene_0383_CBX1
ggaggtactccactttgccc

SEQ ID NO: 386 - DNA, 20 bp, Artificial Sequence
  Synthetic: rene_0384_CBX1
ctctcctctcccttatcttc

SEQ ID NO: 387 - DNA, 20 bp, Artificial Sequence
  Synthetic: rene_0385_CBX1
atcaggaacatgagctctcc

SEQ ID NO: 388 - DNA, 20 bp, Artificial Sequence
  Synthetic: rene_0386_CBX1
tgcagtcacagaaaacagca

SEQ ID NO: 389 - DNA, 20 bp, Artificial Sequence
  Synthetic: rene_0387_CBX1
ctcatagaaggatatgacaa

SEQ ID NO: 390 - DNA, 20 bp, Artificial Sequence
  Synthetic: rene_0388_CBX1
caccacatattcctcttcct

SEQ ID NO: 391 - DNA, 20 bp, Artificial Sequence
  Synthetic: rene_0389_CBX1
tctgtctcatgtgctgtttt

SEQ ID NO: 392 - DNA, 20 bp, Artificial Sequence
  Synthetic: rene_0390_CBX2
cgagtagagggacagactgt

SEQ ID NO: 393 - DNA, 20 bp, Artificial Sequence
  Synthetic: rene_0391_CBX2
accctgccacccagcagaga

SEQ ID NO: 394 - DNA, 20 bp, Artificial Sequence
  Synthetic: rene_0392_CBX2
gccaccaggatctgggcctt

SEQ ID NO: 395 - DNA, 20 bp, Artificial Sequence
  Synthetic: rene_0393_CBX2
tgctccacagccccaccgct

SEQ ID NO: 396 - DNA, 20 bp, Artificial Sequence
  Synthetic: rene_0394_CBX2
cttcctggagggctcattcc

SEQ ID NO: 397 - DNA, 20 bp, Artificial Sequence
  Synthetic: rene_0395_CBX2
tcaccgacgtcactgccaac

SEQ ID NO: 398 - DNA, 20 bp, Artificial Sequence
  Synthetic: rene_0396_CBX2
cgtcccccaaggaccccctg

SEQ ID NO: 399 - DNA, 20 bp, Artificial Sequence
  Synthetic: rene_0397_CBX2
ctctgggggcaggggctttc

SEQ ID NO: 400 - DNA, 20 bp, Artificial Sequence
  Synthetic: rene_0398_CBX3
atgagaaacatcaattctcc

SEQ ID NO: 401 - DNA, 20 bp, Artificial Sequence
  Synthetic: rene_0399_CBX3
gattgtccagaattgattga

SEQ ID NO: 402 - DNA, 20 bp, Artificial Sequence
  Synthetic: rene_0400_CBX3
tgaagagagactaacttggc

SEQ ID NO: 403 - DNA, 20 bp, Artificial Sequence
  Synthetic: rene_0401_CBX3
ccagaggtcttgatcctgaa

SEQ ID NO: 404 - DNA, 20 bp, Artificial Sequence
  Synthetic: rene_0402_CBX3
ctgtcatcagattcactgtc

SEQ ID NO: 405 - DNA, 20 bp, Artificial Sequence
  Synthetic: rene_0403_CBX3
ccattcactacacgtcgatc

SEQ ID NO: 406 - DNA, 20 bp, Artificial Sequence
  Synthetic: rene_0404_CBX3
gccagcaccaagtctgcctc

SEQ ID NO: 407 - DNA, 20 bp, Artificial Sequence
  Synthetic: rene_0405_CBX3
ctgaagtggaagggatttac

SEQ ID NO: 408 - DNA, 20 bp, Artificial Sequence
  Synthetic: rene_0406_CBX4
cctggagcacccgccgcacc

SEQ ID NO: 409 - DNA, 20 bp, Artificial Sequence
  Synthetic: rene_0407_CBX4
ggcttcggccctctcttccg

SEQ ID NO: 410 - DNA, 20 bp, Artificial Sequence
  Synthetic: rene_0408_CBX4
gagagcagcccctgcagctc

SEQ ID NO: 411 - DNA, 20 bp, Artificial Sequence
  Synthetic: rene_0409_CBX4
ggaatataattatcaccgac

SEQ ID NO: 412 - DNA, 20 bp, Artificial Sequence
  Synthetic: rene_0410_CBX4
gcccccgcaccttgcgccca

SEQ ID NO: 413 - DNA, 20 bp, Artificial Sequence
  Synthetic: rene_0411_CBX4
cccgtcgttccaatgtcctg

SEQ ID NO: 414 - DNA, 20 bp, Artificial Sequence
  Synthetic: rene_0412_CBX4
aaagtcctgtcggcaggagg

SEQ ID NO: 415 - DNA, 20 bp, Artificial Sequence
  Synthetic: rene_0413_CBX4
gggtcgggctggtaggggtg

SEQ ID NO: 416 - DNA, 20 bp, Artificial Sequence
  Synthetic: rene_0414_CBX5
attaggaacattaaatcacc

SEQ ID NO: 417 - DNA, 20 bp, Artificial Sequence
  Synthetic: rene_0415_CBX5
agagaggactggaaccagaa

SEQ ID NO: 418 - DNA, 20 bp, Artificial Sequence
  Synthetic: rene_0416_CBX5
tgaagagagactgacatggc

SEQ ID NO: 419 - DNA, 20 bp, Artificial Sequence
  Synthetic: rene_0417_CBX5
accctccttcatcttcttat

SEQ ID NO: 420 - DNA, 20 bp, Artificial Sequence
  Synthetic: rene_0418_CBX5
caagaaccaggtcagcttca

SEQ ID NO: 421 - DNA, 20 bp, Artificial Sequence
  Synthetic: rene_0419_CBX5
tggttccagtcctctctcaa

SEQ ID NO: 422 - DNA, 20 bp, Artificial Sequence
  Synthetic: rene_0420_CBX5
tcaggttcccaagtattgtg

SEQ ID NO: 423 - DNA, 20 bp, Artificial Sequence
  Synthetic: rene_0421_CBX5
atgtcatcggcactgtttga

SEQ ID NO: 424 - DNA, 20 bp, Artificial Sequence
  Synthetic: rene_0422_CBX6
ggtttgggtcccctcttctt

SEQ ID NO: 425 - DNA, 20 bp, Artificial Sequence
  Synthetic: rene_0423_CBX6
atgatggattcggccgcgaa

SEQ ID NO: 426 - DNA, 20 bp, Artificial Sequence
  Synthetic: rene_0424_CBX6
ggtcccctcttcttgggccc

SEQ ID NO: 427 - DNA, 20 bp, Artificial Sequence
  Synthetic: rene_0425_CBX6
gagaaggtggctgctggggt

SEQ ID NO: 428 - DNA, 20 bp, Artificial Sequence
  Synthetic: rene_0426_CBX6
tctgtcaagccgagcgccag

SEQ ID NO: 429 - DNA, 20 bp, Artificial Sequence
  Synthetic: rene_0427_CBX6
ggatccgccgtttgatgatg

SEQ ID NO: 430 - DNA, 20 bp, Artificial Sequence
  Synthetic: rene_0428_CBX6
gcccttctcggagacggtgc

SEQ ID NO: 431 - DNA, 20 bp, Artificial Sequence
  Synthetic: rene_0429_CBX6
ttcgaaggctgcaatgagcc

SEQ ID NO: 432 - DNA, 20 bp, Artificial Sequence
  Synthetic: rene_0430_CBX7
ggacctctcttcctataccc

SEQ ID NO: 433 - DNA, 20 bp, Artificial Sequence
  Synthetic: rene_0431_CBX7
cacttcaccagatactcgac

SEQ ID NO: 434 - DNA, 20 bp, Artificial Sequence
  Synthetic: rene_0432_CBX7
ggggccatcctttccacttc

SEQ ID NO: 435 - DNA, 20 bp, Artificial Sequence
  Synthetic: rene_0433_CBX7
ggggcttgcggagcgggaag

SEQ ID NO: 436 - DNA, 20 bp, Artificial Sequence
  Synthetic: rene_0434_CBX8
cccgtggcctcagctgagct

SEQ ID NO: 437 - DNA, 20 bp, Artificial Sequence
  Synthetic: rene_0435_CBX8
accgtcaccattaaggaaag

SEQ ID NO: 438 - DNA, 20 bp, Artificial Sequence
  Synthetic: rene_0436_CBX8
aggtcacgtccgtgaccacc

SEQ ID NO: 439 - DNA, 20 bp, Artificial Sequence
  Synthetic: rene_0437_CBX8
gggccatagagctccatctc

SEQ ID NO: 440 - DNA, 20 bp, Artificial Sequence
  Synthetic: rene_0438_CBX8
gaagtgactcagccaggggc

SEQ ID NO: 441 - DNA, 20 bp, Artificial Sequence
  Synthetic: rene_0439_CBX8
cagccggccacagtgtgatc

SEQ ID NO: 442 - DNA, 20 bp, Artificial Sequence
  Synthetic: rene_0440_CBX8
cttaatggtgacggtcaaaa

SEQ ID NO: 443 - DNA, 20 bp, Artificial Sequence
  Synthetic: rene_0441_CBX8
gaaggccctcccgggcccgg

SEQ ID NO: 444 - DNA, 20 bp, Artificial Sequence
  Synthetic: rene_0442_CCL21
tgtggggatggtgtcttgtc

SEQ ID NO: 445 - DNA, 20 bp, Artificial Sequence
  Synthetic: rene_0443_CCL21
gctgtacttgaggcaacagt

SEQ ID NO: 446 - DNA, 20 bp, Artificial Sequence
  Synthetic: rene_0444_CCL21
ggtctgcacatagctctgcc

SEQ ID NO: 447 - DNA, 20 bp, Artificial Sequence
  Synthetic: rene_0445_CCL21
gagccctttcctttcttgcc

SEQ ID NO: 448 - DNA, 20 bp, Artificial Sequence
  Synthetic: rene_0446_CCL21
ttgccagtcttggaggcccc

SEQ ID NO: 449 - DNA, 20 bp, Artificial Sequence
  Synthetic: rene_0447_CCL21
ctttcttgccagtcttggag

SEQ ID NO: 450 - DNA, 20 bp, Artificial Sequence
  Synthetic: rene_0448_CCR7
aagaggctcaagaccatgac

SEQ ID NO: 451 - DNA, 20 bp, Artificial Sequence
  Synthetic: rene_0449_CCR7
ccatctacaagatgagcttc

SEQ ID NO: 452 - DNA, 20 bp, Artificial Sequence
  Synthetic: rene_0450_CCR7
gtgggcctactgggcaatgg

SEQ ID NO: 453 - DNA, 20 bp, Artificial Sequence
  Synthetic: rene_0451_CCR7
aagcctggttcctccctatc

SEQ ID NO: 454 - DNA, 20 bp, Artificial Sequence
  Synthetic: rene_0452_CCR7
tggtccccctgctggccatg

SEQ ID NO: 455 - DNA, 20 bp, Artificial Sequence
  Synthetic: rene_0453_CCR7
agcgcaacaaggccatcaag

SEQ ID NO: 456 - DNA, 20 bp, Artificial Sequence
  Synthetic: rene_0454_CCR7
aagttccgcacgtccttctt

SEQ ID NO: 457 - DNA, 20 bp, Artificial Sequence
  Synthetic: rene_0455_CCR7
caagctcatctttgccatct

SEQ ID NO: 458 - DNA, 20 bp, Artificial Sequence
  Synthetic: rene_0456_CCRL2
ccaggataagcacaaccagg

SEQ ID NO: 459 - DNA, 20 bp, Artificial Sequence
  Synthetic: rene_0457_CCRL2
ccttgtgcaaaaacactagg

SEQ ID NO: 460 - DNA, 20 bp, Artificial Sequence
  Synthetic: rene_0458_CCRL2
aagtcagaaaatgcttccag

SEQ ID NO: 461 - DNA, 20 bp, Artificial Sequence
  Synthetic: rene_0459_CCRL2
ctgtccactttcaaagaaca

SEQ ID NO: 462 - DNA, 20 bp, Artificial Sequence
  Synthetic: rene_0460_CCRL2
gcagaactcccttcctgcca

SEQ ID NO: 463 - DNA, 20 bp, Artificial Sequence
  Synthetic: rene_0461_CCRL2
tctatgtgcaaatgagaaaa

SEQ ID NO: 464 - DNA, 20 bp, Artificial Sequence
  Synthetic: rene_0462_CCRL2
ccataatggtagtcttcctt

SEQ ID NO: 465 - DNA, 20 bp, Artificial Sequence
  Synthetic: rene_0463_CCRL2
aattgccttctgactgtgca

SEQ ID NO: 466 - DNA, 20 bp, Artificial Sequence
  Synthetic: rene_0464_CD160
accaacaccatctatcccag

SEQ ID NO: 467 - DNA, 20 bp, Artificial Sequence
  Synthetic: rene_0465_CD160
ttgtaggaagcctgaactga

SEQ ID NO: 468 - DNA, 20 bp, Artificial Sequence
  Synthetic: rene_0466_CD160
aactggtctcaggagaacag

SEQ ID NO: 469 - DNA, 20 bp, Artificial Sequence
  Synthetic: rene_0467_CD160
ttatgccatacagtacagat

SEQ ID NO: 470 - DNA, 20 bp, Artificial Sequence
  Synthetic: rene_0468_CD160
aatcccgtcactgtgtagtt

SEQ ID NO: 471 - DNA, 20 bp, Artificial Sequence
  Synthetic: rene_0469_CD160
gtcgcgttccttcctgggaa

SEQ ID NO: 472 - DNA, 20 bp, Artificial Sequence
  Synthetic: rene_0470_CD160
aaacagctgagacttaaaag

SEQ ID NO: 473 - DNA, 20 bp, Artificial Sequence
  Synthetic: rene_0471_CD160
tgcaaggacaggtctggaga

SEQ ID NO: 474 - DNA, 20 bp, Artificial Sequence
  Synthetic: rene_0472_CD200
ggtgagacagagtcactgta

SEQ ID NO: 475 - DNA, 20 bp, Artificial Sequence
  Synthetic: rene_0473_CD200
gagtcccagctgggtaatgt

SEQ ID NO: 476 - DNA, 20 bp, Artificial Sequence
  Synthetic: rene_0474_CD200
agttccgctattgctaagca

SEQ ID NO: 477 - DNA, 20 bp, Artificial Sequence
  Synthetic: rene_0475_CD200
cagtacagtaagattgagat

SEQ ID NO: 478 - DNA, 20 bp, Artificial Sequence
  Synthetic: rene_0476_CD200
aggaagcaggtgtgtacagc

SEQ ID NO: 479 - DNA, 20 bp, Artificial Sequence
  Synthetic: rene_0477_CD200
ctaggagtgtagctgtaagg

SEQ ID NO: 480 - DNA, 20 bp, Artificial Sequence
  Synthetic: rene_0478_CD200
ggtggtcttcagagaatttg

SEQ ID NO: 481 - DNA, 20 bp, Artificial Sequence
  Synthetic: rene_0479_CD200
ggaagatctcaggaacggcc

SEQ ID NO: 482 - DNA, 20 bp, Artificial Sequence
  Synthetic: rene_0480_CD244
gttgtaactgaagaggcact

SEQ ID NO: 483 - DNA, 20 bp, Artificial Sequence
  Synthetic: rene_0481_CD244
ctggaggggggagcaccatc

SEQ ID NO: 484 - DNA, 20 bp, Artificial Sequence
  Synthetic: rene_0482_CD244
ccttccaatacttccaatga

SEQ ID NO: 485 - DNA, 20 bp, Artificial Sequence
  Synthetic: rene_0483_CD244
tagtcaagaacttgagtctt

SEQ ID NO: 486 - DNA, 20 bp, Artificial Sequence
  Synthetic: rene_0484_CD244
tgagggcagcaacttcttcc

SEQ ID NO: 487 - DNA, 20 bp, Artificial Sequence
  Synthetic: rene_0485_CD244
cgaagatgtcaaggatctga

SEQ ID NO: 488 - DNA, 20 bp, Artificial Sequence
  Synthetic: rene_0486_CD244
agatccttgacatcttcgta

SEQ ID NO: 489 - DNA, 20 bp, Artificial Sequence
  Synthetic: rene_0487_CD244
cagatatactggtgacctcc

SEQ ID NO: 490 - DNA, 20 bp, Artificial Sequence
  Synthetic: rene_0488_CD274
aatgtgaccagcacactgag

SEQ ID NO: 491 - DNA, 20 bp, Artificial Sequence
  Synthetic: rene_0489_CD274
ccagggagagctggtccttc

SEQ ID NO: 492 - DNA, 20 bp, Artificial Sequence
  Synthetic: rene_0490_CD274
gttgtggatccagtcacctc

SEQ ID NO: 493 - DNA, 20 bp, Artificial Sequence
  Synthetic: rene_0491_CD274
ctcaggatctaatctcctaa

SEQ ID NO: 494 - DNA, 20 bp, Artificial Sequence
  Synthetic: rene_0492_CD274
ggagattagatcctgaggaa

SEQ ID NO: 495 - DNA, 20 bp, Artificial Sequence
  Synthetic: rene_0493_CD274
acatctgtgatctgaagtgc

SEQ ID NO: 496 - DNA, 20 bp, Artificial Sequence
  Synthetic: rene_0494_CD274
ctgtcacggttcccaaggac

SEQ ID NO: 497 - DNA, 20 bp, Artificial Sequence
  Synthetic: rene_0495_CD274
ccaatagacaattagtgcag

SEQ ID NO: 498 - DNA, 20 bp, Artificial Sequence
  Synthetic: rene_0496_CD28
gtgaagcagtcgcccatgct

SEQ ID NO: 499 - DNA, 20 bp, Artificial Sequence
  Synthetic: rene_0497_CD28
ccatcacagttgaaccccgt

SEQ ID NO: 500 - DNA, 20 bp, Artificial Sequence
  Synthetic: rene_0498_CD28
tatgttaaccaaacagatat

SEQ ID NO: 501 - DNA, 20 bp, Artificial Sequence
  Synthetic: rene_0499_CD28
agtaaacctgaagctgctgg

SEQ ID NO: 502 - DNA, 20 bp, Artificial Sequence
  Synthetic: rene_0500_CD28
gttaacatacaaattctgga

SEQ ID NO: 503 - DNA, 20 bp, Artificial Sequence
  Synthetic: rene_0501_CD28
acatggataatggttccatt

SEQ ID NO: 504 - DNA, 20 bp, Artificial Sequence
  Synthetic: rene_0502_CD28
ccggaccttctaagcccttt

SEQ ID NO: 505 - DNA, 20 bp, Artificial Sequence
  Synthetic: rene_0503_CD28
ctcaaaaacggggttcaact

SEQ ID NO: 506 - DNA, 20 bp, Artificial Sequence
  Synthetic: rene_0504_CD3E
ctactggagcaagaatagaa

SEQ ID NO: 507 - DNA, 20 bp, Artificial Sequence
  Synthetic: rene_0505_CD3E
agaattggagcaaagtggtt

SEQ ID NO: 508 - DNA, 20 bp, Artificial Sequence
  Synthetic: rene_0506_CD3E
cttcctctggggtagcagac

SEQ ID NO: 509 - DNA, 20 bp, Artificial Sequence
  Synthetic: rene_0507_CD3E
tcatcctcatcaccgcctat

SEQ ID NO: 510 - DNA, 20 bp, Artificial Sequence
  Synthetic: rene_0508_CD3E
agatccaggatactgagggc

SEQ ID NO: 511 - DNA, 20 bp, Artificial Sequence
  Synthetic: rene_0509_CD3E
cctgccgccagcacccgctc

SEQ ID NO: 512 - DNA, 20 bp, Artificial Sequence
  Synthetic: rene_0510_CD3E
tcattgtgttgccatagtat

SEQ ID NO: 513 - DNA, 20 bp, Artificial Sequence
  Synthetic: rene_0511_CD3E
ctccaattctgaaaattcct

SEQ ID NO: 514 - DNA, 20 bp, Artificial Sequence
  Synthetic: rene_0512_CD40LG
atgaatacaaaatcttcatg

SEQ ID NO: 515 - DNA, 20 bp, Artificial Sequence
  Synthetic: rene_0513_CD40LG
ctgctggcctcacttatgac

SEQ ID NO: 516 - DNA, 20 bp, Artificial Sequence
  Synthetic: rene_0514_CD40LG
ggcagaggctggctataaat

SEQ ID NO: 517 - DNA, 20 bp, Artificial Sequence
  Synthetic: rene_0515_CD40LG
agtaagccaaaggacgtgaa

SEQ ID NO: 518 - DNA, 20 bp, Artificial Sequence
  Synthetic: rene_0516_CD40LG
tagccagcctctgcctaaag

SEQ ID NO: 519 - DNA, 20 bp, Artificial Sequence
  Synthetic: rene_0517_CD40LG
cagggttaccaagttgttgc

SEQ ID NO: 520 - DNA, 20 bp, Artificial Sequence
  Synthetic: rene_0518_CD40LG
atctcctcacagttcagtaa

SEQ ID NO: 521 - DNA, 20 bp, Artificial Sequence
  Synthetic: rene_0519_CD40LG
tattcatgaaaacgatacag

SEQ ID NO: 522 - DNA, 20 bp, Artificial Sequence
  Synthetic: rene_0520_CD46
tgtacaccacctccaaaaat

SEQ ID NO: 523 - DNA, 20 bp, Artificial Sequence
  Synthetic: rene_0521_CD46
tgttgtcccgtacagatatc

SEQ ID NO: 524 - DNA, 20 bp, Artificial Sequence
  Synthetic: rene_0522_CD46
ctacaaagcaacagttatgt

SEQ ID NO: 525 - DNA, 20 bp, Artificial Sequence
  Synthetic: rene_0523_CD46
aaggatcccgtatatatgga

SEQ ID NO: 526 - DNA, 20 bp, Artificial Sequence
  Synthetic: rene_0524_CD46
cctcgatggcagcgacacaa

SEQ ID NO: 527 - DNA, 20 bp, Artificial Sequence
  Synthetic: rene_0525_CD46
gtctggtaagtggcatattc

SEQ ID NO: 528 - DNA, 20 bp, Artificial Sequence
  Synthetic: rene_0526_CD46
ccaatgagctccatagcttc

SEQ ID NO: 529 - DNA, 20 bp, Artificial Sequence
  Synthetic: rene_0527_CD46
cacttataatctactcgttc

SEQ ID NO: 530 - DNA, 20 bp, Artificial Sequence
  Synthetic: rene_0528_CD5
ggagagaaattcctactgca

SEQ ID NO: 531 - DNA, 20 bp, Artificial Sequence
  Synthetic: rene_0529_CD5
caggcaaggctcacccgttc

SEQ ID NO: 532 - DNA, 20 bp, Artificial Sequence
  Synthetic: rene_0530_CD5
ctgaagcaatgctccaggga

SEQ ID NO: 533 - DNA, 20 bp, Artificial Sequence
  Synthetic: rene_0531_CD5
catcgcaaccacacggcaac

SEQ ID NO: 534 - DNA, 20 bp, Artificial Sequence
  Synthetic: rene_0532_CD5
tctcccaaagttcgtggcac

SEQ ID NO: 535 - DNA, 20 bp, Artificial Sequence
  Synthetic: rene_0533_CD5
gttcattcccgttgggccaa

SEQ ID NO: 536 - DNA, 20 bp, Artificial Sequence
  Synthetic: rene_0534_CD5
tgctgtggctgcagttggag

SEQ ID NO: 537 - DNA, 20 bp, Artificial Sequence
  Synthetic: rene_0535_CD5
cagcccaaggtgcagagccg

SEQ ID NO: 538 - DNA, 20 bp, Artificial Sequence
  Synthetic: rene_0536_CD80
ctgataacctgctcccatcc

SEQ ID NO: 539 - DNA, 20 bp, Artificial Sequence
  Synthetic: rene_0537_CD80
aatatgacaaccaaccacag

SEQ ID NO: 540 - DNA, 20 bp, Artificial Sequence
  Synthetic: rene_0538_CD80
ccaagatcctgaaactgagc

SEQ ID NO: 541 - DNA, 20 bp, Artificial Sequence
  Synthetic: rene_0539_CD80
ctgctaacagcatagagctc

SEQ ID NO: 542 - DNA, 20 bp, Artificial Sequence
  Synthetic: rene_0540_CD80
atacttcagaacaacacact

SEQ ID NO: 543 - DNA, 20 bp, Artificial Sequence
  Synthetic: rene_0541_CD80
agagtgaatcagaccttcaa

SEQ ID NO: 544 - DNA, 20 bp, Artificial Sequence
  Synthetic: rene_0542_CD80
ccttctcaatctctcattcc

SEQ ID NO: 545 - DNA, 20 bp, Artificial Sequence
  Synthetic: rene_0543_CD80
ccccaagatgcagagagaga

SEQ ID NO: 546 - DNA, 20 bp, Artificial Sequence
  Synthetic: rene_0544_CD86
gcaggaccaggaaaacttgg

SEQ ID NO: 547 - DNA, 20 bp, Artificial Sequence
  Synthetic: rene_0545_CD86
catagaattagacagaaaac

SEQ ID NO: 548 - DNA, 20 bp, Artificial Sequence
  Synthetic: rene_0546_CD86
tgcataacaccatcatactc

SEQ ID NO: 549 - DNA, 20 bp, Artificial Sequence
  Synthetic: rene_0547_CD86
aatgagactgcagacctgcc

SEQ ID NO: 550 - DNA, 20 bp, Artificial Sequence
  Synthetic: rene_0548_CD86
ctaagaaccaagaattcaac

SEQ ID NO: 551 - DNA, 20 bp, Artificial Sequence
  Synthetic: rene_0549_CD86
ctggtcctgccaaaatacta

SEQ ID NO: 552 - DNA, 20 bp, Artificial Sequence
  Synthetic: rene_0550_CD86
cagaatacagaagatggtca

SEQ ID NO: 553 - DNA, 20 bp, Artificial Sequence
  Synthetic: rene_0551_CD86
tgatggatgatacattgata

SEQ ID NO: 554 - DNA, 20 bp, Artificial Sequence
  Synthetic: rene_0552_CD9
caaggacacctacaacaagc

SEQ ID NO: 555 - DNA, 20 bp, Artificial Sequence
  Synthetic: rene_0553_CD9
gctgggggcgtggaacagtt

SEQ ID NO: 556 - DNA, 20 bp, Artificial Sequence
  Synthetic: rene_0554_CD9
aatggcgaatatcaccaaga

SEQ ID NO: 557 - DNA, 20 bp, Artificial Sequence
  Synthetic: rene_0555_CD9
gcatgatcttcagtatgatc

SEQ ID NO: 558 - DNA, 20 bp, Artificial Sequence
  Synthetic: rene_0556_CD9
tctcagacatctgccccaag

SEQ ID NO: 559 - DNA, 20 bp, Artificial Sequence
  Synthetic: rene_0557_CD9
agcttgttgtaggtgtcctt

SEQ ID NO: 560 - DNA, 20 bp, Artificial Sequence
  Synthetic: rene_0558_CD9
gagtacgtccttcttggggc

SEQ ID NO: 561 - DNA, 20 bp, Artificial Sequence
  Synthetic: rene_0559_CD9
ccgctggggctcatccttgg

SEQ ID NO: 562 - DNA, 20 bp, Artificial Sequence
  Synthetic: rene_0560_CDC42
ccaacagcaccatcgcccac

SEQ ID NO: 563 - DNA, 20 bp, Artificial Sequence
  Synthetic: rene_0561_CDC42
agtggtctctccatcttcat

SEQ ID NO: 564 - DNA, 20 bp, Artificial Sequence
  Synthetic: rene_0562_CDC42
agtcccaacaagcaagaaag

SEQ ID NO: 565 - DNA, 20 bp, Artificial Sequence
  Synthetic: rene_0563_CDC42
aaatgaagatggagagacca

SEQ ID NO: 566 - DNA, 20 bp, Artificial Sequence
  Synthetic: rene_0564_CDC42
atgaggctatcctagctgcc

SEQ ID NO: 567 - DNA, 20 bp, Artificial Sequence
  Synthetic: rene_0565_CDC42
tggataactcagcggtcgta

SEQ ID NO: 568 - DNA, 20 bp, Artificial Sequence
  Synthetic: rene_0566_CDC42
tcaatagtagaggggtcatc

SEQ ID NO: 569 - DNA, 20 bp, Artificial Sequence
  Synthetic: rene_0567_CDC42
acaactatgcagtcacagtt

SEQ ID NO: 570 - DNA, 20 bp, Artificial Sequence
  Synthetic: rene_0568_CDH4
gtgtagagggactcacggtc

SEQ ID NO: 571 - DNA, 20 bp, Artificial Sequence
  Synthetic: rene_0569_CDH4
ggagattaatgccgtgtaat

SEQ ID NO: 572 - DNA, 20 bp, Artificial Sequence
  Synthetic: rene_0570_CDH4
aggggaagtagggagcctcg

SEQ ID NO: 573 - DNA, 20 bp, Artificial Sequence
  Synthetic: rene_0571_CDH4
agctgtggaccctgaccggt

SEQ ID NO: 574 - DNA, 20 bp, Artificial Sequence
  Synthetic: rene_0572_CDH4
tctgctgtctggctgtccca

SEQ ID NO: 575 - DNA, 20 bp, Artificial Sequence
  Synthetic: rene_0573_CDH4
atgctgacagtgatggtgtc

SEQ ID NO: 576 - DNA, 20 bp, Artificial Sequence
  Synthetic: rene_0574_CDH4
aagtccatgctgttggtctc

SEQ ID NO: 577 - DNA, 20 bp, Artificial Sequence
  Synthetic: rene_0575_CDH4
cttggcacgtgccccatggc

SEQ ID NO: 578 - DNA, 20 bp, Artificial Sequence
  Synthetic: rene_0576_CDY1
attagcccacacgagatcac

SEQ ID NO: 579 - DNA, 20 bp, Artificial Sequence
  Synthetic: rene_0577_CDY1
atagacgacagactgaaaaa

SEQ ID NO: 580 - DNA, 20 bp, Artificial Sequence
  Synthetic: rene_0578_CDY1
ccttctgtcaccttgaagac

SEQ ID NO: 581 - DNA, 20 bp, Artificial Sequence
  Synthetic: rene_0579_CDY1
actggaactttcacccaaga

SEQ ID NO: 582 - DNA, 20 bp, Artificial Sequence
  Synthetic: rene_0580_CDY1
aattgaataaaagtattcac

SEQ ID NO: 583 - DNA, 20 bp, Artificial Sequence
  Synthetic: rene_0581_CDY1
aaacaatgccagaagaagaa

SEQ ID NO: 584 - DNA, 20 bp, Artificial Sequence
  Synthetic: rene_0582_CDY1
ggagagttcttagaatagtt

SEQ ID NO: 585 - DNA, 20 bp, Artificial Sequence
  Synthetic: rene_0583_CDY1
gggaatgtaatagaagaaca

SEQ ID NO: 586 - DNA, 20 bp, Artificial Sequence
  Synthetic: rene_0584_CDY2A
attagcccacacgagatcac

SEQ ID NO: 587 - DNA, 20 bp, Artificial Sequence
  Synthetic: rene_0585_CDY2A
atagacgacagactgaaaaa

SEQ ID NO: 588 - DNA, 20 bp, Artificial Sequence
  Synthetic: rene_0586_CDY2A
ccttctgtcaccttgaagac

SEQ ID NO: 589 - DNA, 20 bp, Artificial Sequence
  Synthetic: rene_0587_CDY2A
actggaactttcacccaaga

SEQ ID NO: 590 - DNA, 20 bp, Artificial Sequence
  Synthetic: rene_0588_CDY2A
aattgaataaaagtattcac

SEQ ID NO: 591 - DNA, 20 bp, Artificial Sequence
  Synthetic: rene_0589_CDY2A
aaacaatgccagaagaagaa

SEQ ID NO: 592 - DNA, 20 bp, Artificial Sequence
  Synthetic: rene_0590_CDY2A
ggagagttcttagaatagtt

SEQ ID NO: 593 - DNA, 20 bp, Artificial Sequence
  Synthetic: rene_0591_CDY2A
gggaatgtaatagaagaaca

SEQ ID NO: 594 - DNA, 20 bp, Artificial Sequence
  Synthetic: rene_0592_CDYL
attagcccaaaccacatcgc

SEQ ID NO: 595 - DNA, 20 bp, Artificial Sequence
  Synthetic: rene_0593_CDYL
ctggcagtcactcctgtaac

SEQ ID NO: 596 - DNA, 20 bp, Artificial Sequence
  Synthetic: rene_0594_CDYL
aaacaccctataccaccttc

SEQ ID NO: 597 - DNA, 20 bp, Artificial Sequence
  Synthetic: rene_0595_CDYL
cctcacgctgaaacgcaatc

SEQ ID NO: 598 - DNA, 20 bp, Artificial Sequence
  Synthetic: rene_0596_CDYL
ctgtcatctgtcagacgtcg

SEQ ID NO: 599 - DNA, 20 bp, Artificial Sequence
  Synthetic: rene_0597_CDYL
gcccgggacgttcactcagg

SEQ ID NO: 600 - DNA, 20 bp, Artificial Sequence
  Synthetic: rene_0598_CDYL
tacgacgtctgacagatgac

SEQ ID NO: 601 - DNA, 20 bp, Artificial Sequence
  Synthetic: rene_0599_CDYL
ggctaatgaaaaggcttggt

SEQ ID NO: 602 - DNA, 20 bp, Artificial Sequence
  Synthetic: rene_0600_CDYL2
agctacctgcaggacaaaat

SEQ ID NO: 603 - DNA, 20 bp, Artificial Sequence
  Synthetic: rene_0601_CDYL2
gcttggccaggggagggtta

SEQ ID NO: 604 - DNA, 20 bp, Artificial Sequence
  Synthetic: rene_0602_CDYL2
tgggaggtccccttgctctt

SEQ ID NO: 605 - DNA, 20 bp, Artificial Sequence
  Synthetic: rene_0603_CDYL2
attctggcggacactgtatc

SEQ ID NO: 606 - DNA, 20 bp, Artificial Sequence
  Synthetic: rene_0604_CDYL2
aatgatcatgttggagagca

SEQ ID NO: 607 - DNA, 20 bp, Artificial Sequence
  Synthetic: rene_0605_CDYL2
caaagtgcctctcatccttc

SEQ ID NO: 608 - DNA, 20 bp, Artificial Sequence
  Synthetic: rene_0606_CDYL2
gaggagctccagagctgctt

SEQ ID NO: 609 - DNA, 20 bp, Artificial Sequence
  Synthetic: rene_0607_CDYL2
agaagcctatcgtggtggcc

SEQ ID NO: 610 - DNA, 20 bp, Artificial Sequence
  Synthetic: rene_0608_CECR2
gcgagaggacctcccttcga

SEQ ID NO: 611 - DNA, 20 bp, Artificial Sequence
  Synthetic: rene_0609_CECR2
gacctggacaaccataacgc

SEQ ID NO: 612 - DNA, 20 bp, Artificial Sequence
  Synthetic: rene_0610_CECR2
ctggagaagatggagacaca

SEQ ID NO: 613 - DNA, 20 bp, Artificial Sequence
  Synthetic: rene_0611_CECR2
tgactggcagagacctctcc

SEQ ID NO: 614 - DNA, 20 bp, Artificial Sequence
  Synthetic: rene_0612_CECR2
agtctaaccacccacattct

SEQ ID NO: 615 - DNA, 20 bp, Artificial Sequence
  Synthetic: rene_0613_CECR2
ccccaaggggctttcagtct

SEQ ID NO: 616 - DNA, 20 bp, Artificial Sequence
  Synthetic: rene_0614_CECR2
ggaaccactgctaccaaggc

SEQ ID NO: 617 - DNA, 20 bp, Artificial Sequence
  Synthetic: rene_0615_CECR2
cttgcaccgggtcctctttg

SEQ ID NO: 618 - DNA, 20 bp, Artificial Sequence
  Synthetic: rene_0616_CHD1
gcaggaaccaatcaaaaacc

SEQ ID NO: 619 - DNA, 20 bp, Artificial Sequence
  Synthetic: rene_0617_CHD1
gcctctgctgacactgttgt

SEQ ID NO: 620 - DNA, 20 bp, Artificial Sequence
  Synthetic: rene_0618_CHD1
ccttctgagatggaatcact

SEQ ID NO: 621 - DNA, 20 bp, Artificial Sequence
  Synthetic: rene_0619_CHD1
actgtaggagatgaattgct

SEQ ID NO: 622 - DNA, 20 bp, Artificial Sequence
  Synthetic: rene_0620_CHD1
atgaggtagcaatggttaca

SEQ ID NO: 623 - DNA, 20 bp, Artificial Sequence
  Synthetic: rene_0621_CHD1
ggtgacattaacagcagaaa

SEQ ID NO: 624 - DNA, 20 bp, Artificial Sequence
  Synthetic: rene_0622_CHD1
tatgctcccaagaatgagaa

SEQ ID NO: 625 - DNA, 20 bp, Artificial Sequence
  Synthetic: rene_0623_CHD1
tcccaatccgacaatccata

SEQ ID NO: 626 - DNA, 20 bp, Artificial Sequence
  Synthetic: rene_0624_CHD2
gcttcagcggacacagtcgt

SEQ ID NO: 627 - DNA, 20 bp, Artificial Sequence
  Synthetic: rene_0625_CHD2
ggaggggagaatctggaact

SEQ ID NO: 628 - DNA, 20 bp, Artificial Sequence
  Synthetic: rene_0626_CHD2
acattaacctgaactccgga

SEQ ID NO: 629 - DNA, 20 bp, Artificial Sequence
  Synthetic: rene_0627_CHD2
gagagatcactagaacagaa

SEQ ID NO: 630 - DNA, 20 bp, Artificial Sequence
  Synthetic: rene_0628_CHD2
cataggtgacctgatgagca

SEQ ID NO: 631 - DNA, 20 bp, Artificial Sequence
  Synthetic: rene_0629_CHD2
tgttctagtgatctctccaa

SEQ ID NO: 632 - DNA, 20 bp, Artificial Sequence
  Synthetic: rene_0630_CHD2
acgggcctcatcctctcctt

SEQ ID NO: 633 - DNA, 20 bp, Artificial Sequence
  Synthetic: rene_0631_CHD2
catagccatgttcataaatc

SEQ ID NO: 634 - DNA, 20 bp, Artificial Sequence
  Synthetic: rene_0632_CHD3
gtaggagaggaggctctgga

SEQ ID NO: 635 - DNA, 20 bp, Artificial Sequence
  Synthetic: rene_0633_CHD3
cccaccctgctggcacacct

SEQ ID NO: 636 - DNA, 20 bp, Artificial Sequence
  Synthetic: rene_0634_CHD3
gatacataaccaaatggaag

SEQ ID NO: 637 - DNA, 20 bp, Artificial Sequence
  Synthetic: rene_0635_CHD3
gaggtgcagggactgttggt

SEQ ID NO: 638 - DNA, 20 bp, Artificial Sequence
  Synthetic: rene_0636_CHD3
ggtgcccacatctggaactc

SEQ ID NO: 639 - DNA, 20 bp, Artificial Sequence
  Synthetic: rene_0637_CHD3
ctgacatatccaaagaggac

SEQ ID NO: 640 - DNA, 20 bp, Artificial Sequence
  Synthetic: rene_0638_CHD3
acgagagacatgactccaat

SEQ ID NO: 641 - DNA, 20 bp, Artificial Sequence
  Synthetic: rene_0639_CHD3
ctagatagtggtaattcccc

SEQ ID NO: 642 - DNA, 20 bp, Artificial Sequence
  Synthetic: rene_0640_CHD4
gctgacgagcattaaaacca

SEQ ID NO: 643 - DNA, 20 bp, Artificial Sequence
  Synthetic: rene_0641_CHD4
gagtgaggatgtacttgtag

SEQ ID NO: 644 - DNA, 20 bp, Artificial Sequence
  Synthetic: rene_0642_CHD4
ggaacatcacctgacagtgc

SEQ ID NO: 645 - DNA, 20 bp, Artificial Sequence
  Synthetic: rene_0643_CHD4
ccaaggcccatctcatcagc

SEQ ID NO: 646 - DNA, 20 bp, Artificial Sequence
  Synthetic: rene_0644_CHD4
gttccaagcgtaagagatcc

SEQ ID NO: 647 - DNA, 20 bp, Artificial Sequence
  Synthetic: rene_0645_CHD4
gcttcccactggatgccttc

SEQ ID NO: 648 - DNA, 20 bp, Artificial Sequence
  Synthetic: rene_0646_CHD4
gcggaaagtcatcagcacct

SEQ ID NO: 649 - DNA, 20 bp, Artificial Sequence
  Synthetic: rene_0647_CHD4
tcttcatcaccaccaaagtc

SEQ ID NO: 650 - DNA, 20 bp, Artificial Sequence
  Synthetic: rene_0648_CHD5
cctgtggagcccgtgagcct

SEQ ID NO: 651 - DNA, 20 bp, Artificial Sequence
  Synthetic: rene_0649_CHD5
ctgacatctccaaggaagac

SEQ ID NO: 652 - DNA, 20 bp, Artificial Sequence
  Synthetic: rene_0650_CHD5
ccagaggatacagcagcccg

SEQ ID NO: 653 - DNA, 20 bp, Artificial Sequence
  Synthetic: rene_0651_CHD5
ggctcctcccagatgtacag

SEQ ID NO: 654 - DNA, 20 bp, Artificial Sequence
  Synthetic: rene_0652_CHD5
ctttgaggacaacgccattc

SEQ ID NO: 655 - DNA, 20 bp, Artificial Sequence
  Synthetic: rene_0653_CHD5
aggtccatcatgatgttgag

SEQ ID NO: 656 - DNA, 20 bp, Artificial Sequence
  Synthetic: rene_0654_CHD5
gggtcttaaacagctacaag

SEQ ID NO: 657 - DNA, 20 bp, Artificial Sequence
  Synthetic: rene_0655_CHD5
ttcggggagtagtcactgcc

SEQ ID NO: 658 - DNA, 20 bp, Artificial Sequence
  Synthetic: rene_0656_CHD6
cctaggcccatctcatcagc

SEQ ID NO: 659 - DNA, 20 bp, Artificial Sequence
  Synthetic: rene_0657_CHD6
ctaggaaaatgacatcccat

SEQ ID NO: 660 - DNA, 20 bp, Artificial Sequence
  Synthetic: rene_0658_CHD6
aggagagcccaagtaccaat

SEQ ID NO: 661 - DNA, 20 bp, Artificial Sequence
  Synthetic: rene_0659_CHD6
gcttccccttccttgaatcc

SEQ ID NO: 662 - DNA, 20 bp, Artificial Sequence
  Synthetic: rene_0660_CHD6
actgcagcactgatcaagaa

SEQ ID NO: 663 - DNA, 20 bp, Artificial Sequence
  Synthetic: rene_0661_CHD6
actacaaatctccatcccca

SEQ ID NO: 664 - DNA, 20 bp, Artificial Sequence
  Synthetic: rene_0662_CHD6
aagggactctgaagtcctac

SEQ ID NO: 665 - DNA, 20 bp, Artificial Sequence
  Synthetic: rene_0663_CHD6
ccagaccaactccaagttat

SEQ ID NO: 666 - DNA, 20 bp, Artificial Sequence
  Synthetic: rene_0664_CHD7
gcagcaccaaccagcaagtc

SEQ ID NO: 667 - DNA, 20 bp, Artificial Sequence
  Synthetic: rene_0665_CHD7
catgcagcagcatggtcagc

SEQ ID NO: 668 - DNA, 20 bp, Artificial Sequence
  Synthetic: rene_0666_CHD7
tgagaccacctgagactctc

SEQ ID NO: 669 - DNA, 20 bp, Artificial Sequence
  Synthetic: rene_0667_CHD7
ggaaaaactatccagtccat

SEQ ID NO: 670 - DNA, 20 bp, Artificial Sequence
  Synthetic: rene_0668_CHD7
gcagcagcttgtcaatcagc

SEQ ID NO: 671 - DNA, 20 bp, Artificial Sequence
  Synthetic: rene_0669_CHD7
gtagaagatcctctatttct

SEQ ID NO: 672 - DNA, 20 bp, Artificial Sequence
  Synthetic: rene_0670_CHD7
atgggaatcctacagcattg

SEQ ID NO: 673 - DNA, 20 bp, Artificial Sequence
  Synthetic: rene_0671_CHD7
tgtgcatccaagaaggataa

SEQ ID NO: 674 - DNA, 20 bp, Artificial Sequence
  Synthetic: rene_0672_CHD8
gtgtggaatatgaccctgac

SEQ ID NO: 675 - DNA, 20 bp, Artificial Sequence
  Synthetic: rene_0673_CHD8
ggaatggaaccagtacagac

SEQ ID NO: 676 - DNA, 20 bp, Artificial Sequence
  Synthetic: rene_0674_CHD8
atccccacggtagtgtagaa

SEQ ID NO: 677 - DNA, 20 bp, Artificial Sequence
  Synthetic: rene_0675_CHD8
cctcagaatcagagtttctc

SEQ ID NO: 678 - DNA, 20 bp, Artificial Sequence
  Synthetic: rene_0676_CHD8
gggccaggcaaccacttgct

SEQ ID NO: 679 - DNA, 20 bp, Artificial Sequence
  Synthetic: rene_0677_CHD8
atgtatcctcttatccttct

SEQ ID NO: 680 - DNA, 20 bp, Artificial Sequence
  Synthetic: rene_0678_CHD8
agctgggctaatcaagtccc

SEQ ID NO: 681 - DNA, 20 bp, Artificial Sequence
  Synthetic: rene_0679_CHD8
gctcccatgtgctatcctca

SEQ ID NO: 682 - DNA, 20 bp, Artificial Sequence
  Synthetic: rene_0680_CHD9
actggcacccctctccaaaa

SEQ ID NO: 683 - DNA, 20 bp, Artificial Sequence
  Synthetic: rene_0681_CHD9
ggattaagagtggcttcctc

SEQ ID NO: 684 - DNA, 20 bp, Artificial Sequence
  Synthetic: rene_0682_CHD9
ggatatgctgagtagattct

SEQ ID NO: 685 - DNA, 20 bp, Artificial Sequence
  Synthetic: rene_0683_CHD9
acagaaataaaccacctaat

SEQ ID NO: 686 - DNA, 20 bp, Artificial Sequence
  Synthetic: rene_0684_CHD9
ggtaccagaaccagaccact

SEQ ID NO: 687 - DNA, 20 bp, Artificial Sequence
  Synthetic: rene_0685_CHD9
acctatgtgcttcatcaata

SEQ ID NO: 688 - DNA, 20 bp, Artificial Sequence
  Synthetic: rene_0686_CHD9
gtgatatatgattactggaa

SEQ ID NO: 689 - DNA, 20 bp, Artificial Sequence
  Synthetic: rene_0687_CHD9
atatgggatctcattactcc

SEQ ID NO: 690 - DNA, 20 bp, Artificial Sequence
  Synthetic: rene_0688_CKS2
gaagaggtcgtctaaagaga

SEQ ID NO: 691 - DNA, 20 bp, Artificial Sequence
  Synthetic: rene_0689_CKS2
gacgacctcttccaaaagat

SEQ ID NO: 692 - DNA, 20 bp, Artificial Sequence
  Synthetic: rene_0690_CKS2
caaacaagtacctaaaactc

SEQ ID NO: 693 - DNA, 20 bp, Artificial Sequence
  Synthetic: rene_0691_CKS2
gaaagttctctgggtaacat

SEQ ID NO: 694 - DNA, 20 bp, Artificial Sequence
  Synthetic: rene_0692_CKS2
ggtacttgtttggaaagttc

SEQ ID NO: 695 - DNA, 20 bp, Artificial Sequence
  Synthetic: rene_0693_CKS2
ttgatcttttggaagaggtc

SEQ ID NO: 696 - DNA, 20 bp, Artificial Sequence
  Synthetic: rene_0694_CLIP1
gatgaacccataggcaagaa

SEQ ID NO: 697 - DNA, 20 bp, Artificial Sequence
  Synthetic: rene_0695_CLIP1
agtgaagtcagtcaagtgaa

SEQ ID NO: 698 - DNA, 20 bp, Artificial Sequence
  Synthetic: rene_0696_CLIP1
gagagaaagatgagagagaa

SEQ ID NO: 699 - DNA, 20 bp, Artificial Sequence
  Synthetic: rene_0697_CLIP1
agtgtcaacccaaatatggc

SEQ ID NO: 700 - DNA, 20 bp, Artificial Sequence
  Synthetic: rene_0698_CLIP1
gacttccatagagctatcac

SEQ ID NO: 701 - DNA, 20 bp, Artificial Sequence
  Synthetic: rene_0699_CLIP1
ccttgagctcgagcttcacc

SEQ ID NO: 702 - DNA, 20 bp, Artificial Sequence
  Synthetic: rene_0700_CLIP1
ggtcatccccgttcccattc

SEQ ID NO: 703 - DNA, 20 bp, Artificial Sequence
  Synthetic: rene_0701_CLIP1
cccgaccttcaaagttaaca

SEQ ID NO: 704 - DNA, 20 bp, Artificial Sequence
  Synthetic: rene_0702_CLIP4
gctgttctccaagatatgga

SEQ ID NO: 705 - DNA, 20 bp, Artificial Sequence
  Synthetic: rene_0703_CLIP4
ggaagaagcagaagttgtgc

SEQ ID NO: 706 - DNA, 20 bp, Artificial Sequence
  Synthetic: rene_0704_CLIP4
aagctctataccataccaat

SEQ ID NO: 707 - DNA, 20 bp, Artificial Sequence
  Synthetic: rene_0705_CLIP4
aattcctcagcaacatctac

SEQ ID NO: 708 - DNA, 20 bp, Artificial Sequence
  Synthetic: rene_0706_CLIP4
tgggacctgatgagaggtac

SEQ ID NO: 709 - DNA, 20 bp, Artificial Sequence
  Synthetic: rene_0707_CLIP4
acctgtaagccgaaccatgg

SEQ ID NO: 710 - DNA, 20 bp, Artificial Sequence
  Synthetic: rene_0708_CLIP4
gcacaacttctgcttcttcc

SEQ ID NO: 711 - DNA, 20 bp, Artificial Sequence
  Synthetic: rene_0709_CLIP4
cattatacctgcaaatctgg

SEQ ID NO: 712 - DNA, 20 bp, Artificial Sequence
  Synthetic: rene_0710_CLOCK
ccgtaagctgtagtaaaatg

SEQ ID NO: 713 - DNA, 20 bp, Artificial Sequence
  Synthetic: rene_0711_CLOCK
aaggaactatacaacgcaca

SEQ ID NO: 714 - DNA, 20 bp, Artificial Sequence
  Synthetic: rene_0712_CLOCK
atcacagcccaaccccttct

SEQ ID NO: 715 - DNA, 20 bp, Artificial Sequence
  Synthetic: rene_0713_CLOCK
taggtcatccacatgatagt

SEQ ID NO: 716 - DNA, 20 bp, Artificial Sequence
  Synthetic: rene_0714_CLOCK
actagcatctgactgtgcag

SEQ ID NO: 717 - DNA, 20 bp, Artificial Sequence
  Synthetic: rene_0715_CLOCK
tgcagaacagtagatttgtc

SEQ ID NO: 718 - DNA, 20 bp, Artificial Sequence
  Synthetic: rene_0716_CLOCK
atgggttggtggaagaagat

SEQ ID NO: 719 - DNA, 20 bp, Artificial Sequence
  Synthetic: rene_0717_CLOCK
ctctacaacagagcaccttc

SEQ ID NO: 720 - DNA, 20 bp, Artificial Sequence
  Synthetic: rene_0718_COCH
actgactatagcaccaaaga

SEQ ID NO: 721 - DNA, 20 bp, Artificial Sequence
  Synthetic: rene_0719_COCH
tgatgacagctaggacattc

SEQ ID NO: 722 - DNA, 20 bp, Artificial Sequence
  Synthetic: rene_0720_COCH
gcaccacaaaatacgtaaag

SEQ ID NO: 723 - DNA, 20 bp, Artificial Sequence
  Synthetic: rene_0721_COCH
ccagaggcttggacatcagg

SEQ ID NO: 724 - DNA, 20 bp, Artificial Sequence
  Synthetic: rene_0722_COCH
ccataaaggaagtaggtttc

SEQ ID NO: 725 - DNA, 20 bp, Artificial Sequence
  Synthetic: rene_0723_COCH
gccctataagggagagcccc

SEQ ID NO: 726 - DNA, 20 bp, Artificial Sequence
  Synthetic: rene_0724_COCH
tgtggccaagcctatccctg

SEQ ID NO: 727 - DNA, 20 bp, Artificial Sequence
  Synthetic: rene_0725_COCH
gtgctatagtcagtgaaact

SEQ ID NO: 728 - DNA, 20 bp, Artificial Sequence
  Synthetic: rene_0726_COL7A1
ggattagctggagcacaggc

SEQ ID NO: 729 - DNA, 20 bp, Artificial Sequence
  Synthetic: rene_0727_COL7A1
ctgggagtatctggtgcctc

SEQ ID NO: 730 - DNA, 20 bp, Artificial Sequence
  Synthetic: rene_0728_COL7A1
ccatccagtccgctccggcc

SEQ ID NO: 731 - DNA, 20 bp, Artificial Sequence
  Synthetic: rene_0729_COL7A1
gtccatcctctccaggatct

SEQ ID NO: 732 - DNA, 20 bp, Artificial Sequence
  Synthetic: rene_0730_COL7A1
tcctcggataccaggcactc

SEQ ID NO: 733 - DNA, 20 bp, Artificial Sequence
  Synthetic: rene_0731_COL7A1
acccacaggcccccgaactc

SEQ ID NO: 734 - DNA, 20 bp, Artificial Sequence
  Synthetic: rene_0732_COL7A1
tctggagcagccagtgcaca

SEQ ID NO: 735 - DNA, 20 bp, Artificial Sequence
  Synthetic: rene_0733_COL7A1
ccggagagtgtgcacgactg

SEQ ID NO: 736 - DNA, 20 bp, Artificial Sequence
  Synthetic: rene_0734_CREBBP
ccatgagatccttattggat

SEQ ID NO: 737 - DNA, 20 bp, Artificial Sequence
  Synthetic: rene_0735_CREBBP
accagacccacccaggcctc

SEQ ID NO: 738 - DNA, 20 bp, Artificial Sequence
  Synthetic: rene_0736_CREBBP
cccaccttccctacagatat

SEQ ID NO: 739 - DNA, 20 bp, Artificial Sequence
  Synthetic: rene_0737_CREBBP
actggctgcagtgctctctt

SEQ ID NO: 740 - DNA, 20 bp, Artificial Sequence
  Synthetic: rene_0738_CREBBP
ggggctgctgatctgttgtt

SEQ ID NO: 741 - DNA, 20 bp, Artificial Sequence
  Synthetic: rene_0739_CREBBP
tctgctaataagtgataata

SEQ ID NO: 742 - DNA, 20 bp, Artificial Sequence
  Synthetic: rene_0740_CREBBP
cccacagactttgtgctgct

SEQ ID NO: 743 - DNA, 20 bp, Artificial Sequence
  Synthetic: rene_0741_CREBBP
caaggagcttcccaagttaa

SEQ ID NO: 744 - DNA, 20 bp, Artificial Sequence
  Synthetic: rene_0742_CRLF1
gcttgaaagaggaaatcctt

SEQ ID NO: 745 - DNA, 20 bp, Artificial Sequence
  Synthetic: rene_0743_CRLF1
aagccaaataccagatccgc

SEQ ID NO: 746 - DNA, 20 bp, Artificial Sequence
  Synthetic: rene_0744_CRLF1
ctctttcaagccaaatacca

SEQ ID NO: 747 - DNA, 20 bp, Artificial Sequence
  Synthetic: rene_0745_CRLF1
ttggagccatagatgccaaa

SEQ ID NO: 748 - DNA, 20 bp, Artificial Sequence
  Synthetic: rene_0746_CRLF1
gcatctatggctccaagaaa

SEQ ID NO: 749 - DNA, 20 bp, Artificial Sequence
  Synthetic: rene_0747_CRLF1
aggccggccaggcggcagga

SEQ ID NO: 750 - DNA, 20 bp, Artificial Sequence
  Synthetic: rene_0748_CRLF1
cgccctatgagatctgggtg

SEQ ID NO: 751 - DNA, 20 bp, Artificial Sequence
  Synthetic: rene_0749_CSK
atgaggcgcgtacagagtcc

SEQ ID NO: 752 - DNA, 20 bp, Artificial Sequence
  Synthetic: rene_0750_CSK
ccagagaaggattccgaaac

SEQ ID NO: 753 - DNA, 20 bp, Artificial Sequence
  Synthetic: rene_0751_CSK
gtacccgccttcacgccctc

SEQ ID NO: 754 - DNA, 20 bp, Artificial Sequence
  Synthetic: rene_0752_CSK
ggaatccttctctgggaaat

SEQ ID NO: 755 - DNA, 20 bp, Artificial Sequence
  Synthetic: rene_0753_CSK
gtctcaccaaggaggcgtcc

SEQ ID NO: 756 - DNA, 20 bp, Artificial Sequence
  Synthetic: rene_0754_CSK
ggcgagtgccttatccaaga

SEQ ID NO: 757 - DNA, 20 bp, Artificial Sequence
  Synthetic: rene_0755_CSK
gtgcatcgagacctggctgc

SEQ ID NO: 758 - DNA, 20 bp, Artificial Sequence
  Synthetic: rene_0756_CSK
atgtgctcaagctgctctcg

SEQ ID NO: 759 - DNA, 20 bp, Artificial Sequence
  Synthetic: rene_0757_CTLA4
cctggagatgcatactcaca

SEQ ID NO: 760 - DNA, 20 bp, Artificial Sequence
  Synthetic: rene_0758_CTLA4
acatagacccctgttgtaag

SEQ ID NO: 761 - DNA, 20 bp, Artificial Sequence
  Synthetic: rene_0759_CTLA4
tgtgtgagtatgcatctcca

SEQ ID NO: 762 - DNA, 20 bp, Artificial Sequence
  Synthetic: rene_0760_CTLA4
agcggcacaaggctcagctg

SEQ ID NO: 763 - DNA, 20 bp, Artificial Sequence
  Synthetic: rene_0761_CTLA4
ttctcttcatccctgtcttc

SEQ ID NO: 764 - DNA, 20 bp, Artificial Sequence
  Synthetic: rene_0762_CTLA4
ctcaaagaaacagctgtgag

SEQ ID NO: 765 - DNA, 20 bp, Artificial Sequence
  Synthetic: rene_0763_CTLA4
cactggaggtgcccgtgcag

SEQ ID NO: 766 - DNA, 20 bp, Artificial Sequence
  Synthetic: rene_0764_CTLA4
cagaagacagggatgaagag

SEQ ID NO: 767 - DNA, 20 bp, Artificial Sequence
  Synthetic: rene_0765_CXCR4
gctccaaggaaagcatagag

SEQ ID NO: 768 - DNA, 20 bp, Artificial Sequence
  Synthetic: rene_0766_CXCR4
caggaggatgaaggagtcga

SEQ ID NO: 769 - DNA, 20 bp, Artificial Sequence
  Synthetic: rene_0767_CXCR4
ccacggcatcaactgcccag

SEQ ID NO: 770 - DNA, 20 bp, Artificial Sequence
  Synthetic: rene_0768_CXCR4
cactgagtctgagtcttcaa

SEQ ID NO: 771 - DNA, 20 bp, Artificial Sequence
  Synthetic: rene_0769_CXCR4
cgtgaagaaaatgctaattt

SEQ ID NO: 772 - DNA, 20 bp, Artificial Sequence
  Synthetic: rene_0770_CXCR4
agcacatcatggttggcctt

SEQ ID NO: 773 - DNA, 20 bp, Artificial Sequence
  Synthetic: rene_0771_CXCR4
agccaacagcttccttggcc

SEQ ID NO: 774 - DNA, 20 bp, Artificial Sequence
  Synthetic: rene_0772_CXCR4
cagatatacacttcagataa

SEQ ID NO: 775 - DNA, 20 bp, Artificial Sequence
  Synthetic: rene_0773_CXXC1
ctgtgggcaccccatcaacc

SEQ ID NO: 776 - DNA, 20 bp, Artificial Sequence
  Synthetic: rene_0774_CXXC1
ctctgaggattatacacatc

SEQ ID NO: 777 - DNA, 20 bp, Artificial Sequence
  Synthetic: rene_0775_CXXC1
ggtccatgtaccccacacgc

SEQ ID NO: 778 - DNA, 20 bp, Artificial Sequence
  Synthetic: rene_0776_CXXC1
tgtcgggacatgaagaagtt

SEQ ID NO: 779 - DNA, 20 bp, Artificial Sequence
  Synthetic: rene_0777_CXXC1
actgccctcttccgcagcgc

SEQ ID NO: 780 - DNA, 20 bp, Artificial Sequence
  Synthetic: rene_0778_CXXC1
ctgaaggcgagtgcgggcac

SEQ ID NO: 781 - DNA, 20 bp, Artificial Sequence
  Synthetic: rene_0779_CXXC1
agcaggagcgcaatgtgcgc

SEQ ID NO: 782 - DNA, 20 bp, Artificial Sequence
  Synthetic: rene_0780_CXXC1
tggggcgaagcagagccccg

SEQ ID NO: 783 - DNA, 20 bp, Artificial Sequence
  Synthetic: rene_0781_CYP4V2
gagggggcagagcccctgcc

SEQ ID NO: 784 - DNA, 20 bp, Artificial Sequence
  Synthetic: rene_0782_CYP4V2
gatagaatccaaccagaaaa

SEQ ID NO: 785 - DNA, 20 bp, Artificial Sequence
  Synthetic: rene_0783_CYP4V2
agtgtgactgatgacgaagg

SEQ ID NO: 786 - DNA, 20 bp, Artificial Sequence
  Synthetic: rene_0784_CYP4V2
aagaaggatgggaacacaaa

SEQ ID NO: 787 - DNA, 20 bp, Artificial Sequence
  Synthetic: rene_0785_CYP4V2
ctgtgatggaagaaaagacc

SEQ ID NO: 788 - DNA, 20 bp, Artificial Sequence
  Synthetic: rene_0786_CYP4V2
gcttgatctctggtacctta

SEQ ID NO: 789 - DNA, 20 bp, Artificial Sequence
  Synthetic: rene_0787_CYP4V2
actagttcaaagcaaattga

SEQ ID NO: 790 - DNA, 20 bp, Artificial Sequence
  Synthetic: rene_0788_CYP4V2
agcagatcattgagtacaca

SEQ ID NO: 791 - DNA, 20 bp, Artificial Sequence
  Synthetic: rene_0789_DDIT4
gctccgccaactctcccttc

SEQ ID NO: 792 - DNA, 20 bp, Artificial Sequence
  Synthetic: rene_0790_DDIT4
accgctccacgagcctggag

SEQ ID NO: 793 - DNA, 20 bp, Artificial Sequence
  Synthetic: rene_0791_DDIT4
cccacctggcttaccaactg

SEQ ID NO: 794 - DNA, 20 bp, Artificial Sequence
  Synthetic: rene_0792_DDIT4
ggaccgcttctcgtcgtcgt

SEQ ID NO: 795 - DNA, 20 bp, Artificial Sequence
  Synthetic: rene_0793_DENND5A
gtcacaggagtgtcttcacc

SEQ ID NO: 796 - DNA, 20 bp, Artificial Sequence
  Synthetic: rene_0794_DENND5A
gcatacagcccagagttatc

SEQ ID NO: 797 - DNA, 20 bp, Artificial Sequence
  Synthetic: rene_0795_DENND5A
ccagacgcagctcaattgct

SEQ ID NO: 798 - DNA, 20 bp, Artificial Sequence
  Synthetic: rene_0796_DENND5A
acttgtagtccatgactcca

SEQ ID NO: 799 - DNA, 20 bp, Artificial Sequence
  Synthetic: rene_0797_DENND5A
tgaagaggtgactagcaagc

SEQ ID NO: 800 - DNA, 20 bp, Artificial Sequence
  Synthetic: rene_0798_DENND5A
ccaacagggagcaaatgcaa

SEQ ID NO: 801 - DNA, 20 bp, Artificial Sequence
  Synthetic: rene_0799_DENND5A
catggacagtcgcacccatg

SEQ ID NO: 802 - DNA, 20 bp, Artificial Sequence
  Synthetic: rene_0800_DENND5A
gctggtaaatcctgagttct

SEQ ID NO: 803 - DNA, 20 bp, Artificial Sequence
  Synthetic: rene_0801_DIDO1
gaaggaccactatcgccaag

SEQ ID NO: 804 - DNA, 20 bp, Artificial Sequence
  Synthetic: rene_0802_DIDO1
gtgggagccgtaaggaagcc

SEQ ID NO: 805 - DNA, 20 bp, Artificial Sequence
  Synthetic: rene_0803_DIDO1
gctgcgatggtgcagcactc

SEQ ID NO: 806 - DNA, 20 bp, Artificial Sequence
  Synthetic: rene_0804_DIDO1
gcagattactaacccaagaa

SEQ ID NO: 807 - DNA, 20 bp, Artificial Sequence
  Synthetic: rene_0805_DIDO1
gaggtcagagaggaccaccc

SEQ ID NO: 808 - DNA, 20 bp, Artificial Sequence
  Synthetic: rene_0806_DIDO1
cagaagagaatatcgcttct

SEQ ID NO: 809 - DNA, 20 bp, Artificial Sequence
  Synthetic: rene_0807_DIDO1
ccacactctgcatgttaata

SEQ ID NO: 810 - DNA, 20 bp, Artificial Sequence
  Synthetic: rene_0808_DIDO1
ggattatgttggcaaactca

SEQ ID NO: 811 - DNA, 20 bp, Artificial Sequence
  Synthetic: rene_0809_DMRTC2
gctgcgcctcctgctgccta

SEQ ID NO: 812 - DNA, 20 bp, Artificial Sequence
  Synthetic: rene_0810_DMRTC2
ggagaggcttcccctctcct

SEQ ID NO: 813 - DNA, 20 bp, Artificial Sequence
  Synthetic: rene_0811_DMRTC2
tggagagccccaagggcccc

SEQ ID NO: 814 - DNA, 20 bp, Artificial Sequence
  Synthetic: rene_0812_DMRTC2
accctggcacctccctccag

SEQ ID NO: 815 - DNA, 20 bp, Artificial Sequence
  Synthetic: rene_0813_DMRTC2
agccccacgagggcttcagc

SEQ ID NO: 816 - DNA, 20 bp, Artificial Sequence
  Synthetic: rene_0814_DMRTC2
tgacactcgcaagcctggaa

SEQ ID NO: 817 - DNA, 20 bp, Artificial Sequence
  Synthetic: rene_0815_DMRTC2
tgaagtggttgggagctttg

SEQ ID NO: 818 - DNA, 20 bp, Artificial Sequence
  Synthetic: rene_0816_DNAH12
gacagaacactgggtaaaag

SEQ ID NO: 819 - DNA, 20 bp, Artificial Sequence
  Synthetic: rene_0817_DNAH12
gtggaacgaatagccgaagc

SEQ ID NO: 820 - DNA, 20 bp, Artificial Sequence
  Synthetic: rene_0818_DNAH12
actggtggtttcacaagaac

SEQ ID NO: 821 - DNA, 20 bp, Artificial Sequence
  Synthetic: rene_0819_DNAH12
tatgaagcaatgtgtagaaa

SEQ ID NO: 822 - DNA, 20 bp, Artificial Sequence
  Synthetic: rene_0820_DNAH12
aaagtcacttgacacctcat

SEQ ID NO: 823 - DNA, 20 bp, Artificial Sequence
  Synthetic: rene_0821_DNAH12
caaatccttctacagttctc

SEQ ID NO: 824 - DNA, 20 bp, Artificial Sequence
  Synthetic: rene_0822_DNAH12
agtgattcacagtcaattgg

SEQ ID NO: 825 - DNA, 20 bp, Artificial Sequence
  Synthetic: rene_0823_DNAH12
cccagtgttctgtctaaatt

SEQ ID NO: 826 - DNA, 20 bp, Artificial Sequence
  Synthetic: rene_0824_DND1
accatggtacctgcctcagc

SEQ ID NO: 827 - DNA, 20 bp, Artificial Sequence
  Synthetic: rene_0825_DND1
ggcataggacctgctggctg

SEQ ID NO: 828 - DNA, 20 bp, Artificial Sequence
  Synthetic: rene_0826_DND1
gcaagggacaagttagggtt

SEQ ID NO: 829 - DNA, 20 bp, Artificial Sequence
  Synthetic: rene_0827_DND1
gccatggcagcggcccggtg

SEQ ID NO: 830 - DNA, 20 bp, Artificial Sequence
  Synthetic: rene_0828_DND1
agcagagcgatctgcccggg

SEQ ID NO: 831 - DNA, 20 bp, Artificial Sequence
  Synthetic: rene_0829_DNMT3A
agtgcaccataagatgtcct

SEQ ID NO: 832 - DNA, 20 bp, Artificial Sequence
  Synthetic: rene_0830_DNMT3A
ccagtccactatactgacgt

SEQ ID NO: 833 - DNA, 20 bp, Artificial Sequence
  Synthetic: rene_0831_DNMT3A
ccccacaccagctccccaat

SEQ ID NO: 834 - DNA, 20 bp, Artificial Sequence
  Synthetic: rene_0832_DNMT3A
cccacctgtcccagctgaga

SEQ ID NO: 835 - DNA, 20 bp, Artificial Sequence
  Synthetic: rene_0833_DNMT3A
gctggtggaggtggtgcgta

SEQ ID NO: 836 - DNA, 20 bp, Artificial Sequence
  Synthetic: rene_0834_DNMT3A
ccgtctccgaaccacatgac

SEQ ID NO: 837 - DNA, 20 bp, Artificial Sequence
  Synthetic: rene_0835_DNMT3A
gtttcccagtccactatact

SEQ ID NO: 838 - DNA, 20 bp, Artificial Sequence
  Synthetic: rene_0836_DNMT3A
atggattcgatgttggtctc

SEQ ID NO: 839 - DNA, 20 bp, Artificial Sequence
  Synthetic: rene_0837_DNMT3B
catgtatgatgacgatggct

SEQ ID NO: 840 - DNA, 20 bp, Artificial Sequence
  Synthetic: rene_0838_DNMT3B
gataggagacgagcttattg

SEQ ID NO: 841 - DNA, 20 bp, Artificial Sequence
  Synthetic: rene_0839_DNMT3B
cctgttgtcatgaatggcaa

SEQ ID NO: 842 - DNA, 20 bp, Artificial Sequence
  Synthetic: rene_0840_DNMT3B
ccacctgctgaattactcac

SEQ ID NO: 843 - DNA, 20 bp, Artificial Sequence
  Synthetic: rene_0841_DNMT3B
ccggaagagctttggcatga

SEQ ID NO: 844 - DNA, 20 bp, Artificial Sequence
  Synthetic: rene_0842_DNMT3B
ctgtgcactacacagacgtg

SEQ ID NO: 845 - DNA, 20 bp, Artificial Sequence
  Synthetic: rene_0843_DNMT3B
ctactgcctgcacgacgcac

SEQ ID NO: 846 - DNA, 20 bp, Artificial Sequence
  Synthetic: rene_0844_DNMT3B
cccacacgaggtcccctatt

SEQ ID NO: 847 - DNA, 20 bp, Artificial Sequence
  Synthetic: rene_0845_DOCK3
ggctgtccagactgagcaca

SEQ ID NO: 848 - DNA, 20 bp, Artificial Sequence
  Synthetic: rene_0846_DOCK3
gatgataatacagagaagta

SEQ ID NO: 849 - DNA, 20 bp, Artificial Sequence
  Synthetic: rene_0847_DOCK3
gagagaggaggaaagagtgt

SEQ ID NO: 850 - DNA, 20 bp, Artificial Sequence
  Synthetic: rene_0848_DOCK3
gtagaggagagctgagtgga

SEQ ID NO: 851 - DNA, 20 bp, Artificial Sequence
  Synthetic: rene_0849_DOCK3
ggcctgcaagtgcatgtcac

SEQ ID NO: 852 - DNA, 20 bp, Artificial Sequence
  Synthetic: rene_0850_DOCK3
ataggggattggcaattaca

SEQ ID NO: 853 - DNA, 20 bp, Artificial Sequence
  Synthetic: rene_0851_DOCK3
tctgctcccagtccatcatg

SEQ ID NO: 854 - DNA, 20 bp, Artificial Sequence
  Synthetic: rene_0852_DOCK3
tggtaagactgaacaagaat

SEQ ID NO: 855 - DNA, 20 bp, Artificial Sequence
  Synthetic: rene_0853_DOT1L
gtgtcatagtcaattaaaac

SEQ ID NO: 856 - DNA, 20 bp, Artificial Sequence
  Synthetic: rene_0854_DOT1L
tagtctgaaaaacccaaaac

SEQ ID NO: 857 - DNA, 20 bp, Artificial Sequence
  Synthetic: rene_0855_DOT1L
ctgaaacagcctcctgatct

SEQ ID NO: 858 - DNA, 20 bp, Artificial Sequence
  Synthetic: rene_0856_DOT1L
agactagaaaaatagttttc

SEQ ID NO: 859 - DNA, 20 bp, Artificial Sequence
  Synthetic: rene_0857_DOT1L
atgagcagcatcgtgatgtt

SEQ ID NO: 860 - DNA, 20 bp, Artificial Sequence
  Synthetic: rene_0858_DOT1L
gagggagacggcttcttcac

SEQ ID NO: 861 - DNA, 20 bp, Artificial Sequence
  Synthetic: rene_0859_DOT1L
gggggagatttgctttctaa

SEQ ID NO: 862 - DNA, 20 bp, Artificial Sequence
  Synthetic: rene_0860_DOT1L
ctctcagaagagtggaggga

SEQ ID NO: 863 - DNA, 20 bp, Artificial Sequence
  Synthetic: rene_0861_DPF1
cggagacccccgatgccata

SEQ ID NO: 864 - DNA, 20 bp, Artificial Sequence
  Synthetic: rene_0862_DPF1
cacgtaccccgcccgctgtt

SEQ ID NO: 865 - DNA, 20 bp, Artificial Sequence
  Synthetic: rene_0863_DPF1
gccccgggacagatttacac

SEQ ID NO: 866 - DNA, 20 bp, Artificial Sequence
  Synthetic: rene_0864_DPF1
cgcatgacctcgaggtggaa

SEQ ID NO: 867 - DNA, 20 bp, Artificial Sequence
  Synthetic: rene_0865_DPF1
cttcaggtgccggagacaga

SEQ ID NO: 868 - DNA, 20 bp, Artificial Sequence
  Synthetic: rene_0866_DPF1
caattcacggtgaacatgac

SEQ ID NO: 869 - DNA, 20 bp, Artificial Sequence
  Synthetic: rene_0867_DPF1
tgatgactgcgatcggggtt

SEQ ID NO: 870 - DNA, 20 bp, Artificial Sequence
  Synthetic: rene_0868_DPF1
ctttgtgcctcagggaccca

SEQ ID NO: 871 - DNA, 20 bp, Artificial Sequence
  Synthetic: rene_0869_DPF2
ccagaggtctgaggagcaga

SEQ ID NO: 872 - DNA, 20 bp, Artificial Sequence
  Synthetic: rene_0870_DPF2
ctgtgaccaacagtcgagcg

SEQ ID NO: 873 - DNA, 20 bp, Artificial Sequence
  Synthetic: rene_0871_DPF2
aaacaaaagcatacctcgaa

SEQ ID NO: 874 - DNA, 20 bp, Artificial Sequence
  Synthetic: rene_0872_DPF2
catccagatgtaacaattgc

SEQ ID NO: 875 - DNA, 20 bp, Artificial Sequence
  Synthetic: rene_0873_DPF2
tgctcctcagacctctggga

SEQ ID NO: 876 - DNA, 20 bp, Artificial Sequence
  Synthetic: rene_0874_DPF2
ccctttccccgacgcttggg

SEQ ID NO: 877 - DNA, 20 bp, Artificial Sequence
  Synthetic: rene_0875_DPF2
gaggctctgttgcgcactga

SEQ ID NO: 878 - DNA, 20 bp, Artificial Sequence
  Synthetic: rene_0876_DPF2
tggaaaacgttacaagaacc

SEQ ID NO: 879 - DNA, 20 bp, Artificial Sequence
  Synthetic: rene_0877_DPF3
ccctgaacatgaccgaggct

SEQ ID NO: 880 - DNA, 20 bp, Artificial Sequence
  Synthetic: rene_0878_DPF3
taccgaacccacaactgatt

SEQ ID NO: 881 - DNA, 20 bp, Artificial Sequence
  Synthetic: rene_0879_DPF3
gctgcaacaccgctgatgct

SEQ ID NO: 882 - DNA, 20 bp, Artificial Sequence
  Synthetic: rene_0880_DPF3
ggaggagaaggcaggaagga

SEQ ID NO: 883 - DNA, 20 bp, Artificial Sequence
  Synthetic: rene_0881_DPF3
gaagaggatattcccaagcg

SEQ ID NO: 884 - DNA, 20 bp, Artificial Sequence
  Synthetic: rene_0882_DPF3
gcttgggaatatcctcttcc

SEQ ID NO: 885 - DNA, 20 bp, Artificial Sequence
  Synthetic: rene_0883_DPF3
ccaggtggcatcagcccggt

SEQ ID NO: 886 - DNA, 20 bp, Artificial Sequence
  Synthetic: rene_0884_DPF3
gaagagcctcgctcctgtcg

SEQ ID NO: 887 - DNA, 20 bp, Artificial Sequence
  Synthetic: rene_0885_DPP4
gtatcagatgatcttgcctc

SEQ ID NO: 888 - DNA, 20 bp, Artificial Sequence
  Synthetic: rene_0886_DPP4
gagaccaccacagagcagag

SEQ ID NO: 889 - DNA, 20 bp, Artificial Sequence
  Synthetic: rene_0887_DPP4
acgacacagaagtcccactt

SEQ ID NO: 890 - DNA, 20 bp, Artificial Sequence
  Synthetic: rene_0888_DPP4
cccttgatggtaatagcttc

SEQ ID NO: 891 - DNA, 20 bp, Artificial Sequence
  Synthetic: rene_0889_DPP4
gaatcctctcttctgtaatc

SEQ ID NO: 892 - DNA, 20 bp, Artificial Sequence
  Synthetic: rene_0890_DPP4
acataaatgtcattgttcca

SEQ ID NO: 893 - DNA, 20 bp, Artificial Sequence
  Synthetic: rene_0891_DPP4
gaaatagcaaatgtgtctgt

SEQ ID NO: 894 - DNA, 20 bp, Artificial Sequence
  Synthetic: rene_0892_DPP4
agctctgctcatgactgttg

SEQ ID NO: 895 - DNA, 20 bp, Artificial Sequence
  Synthetic: rene_0893_DPPA3
cctgaggactgctgctccta

SEQ ID NO: 896 - DNA, 20 bp, Artificial Sequence
  Synthetic: rene_0894_DPPA3
tctctgcacagacagcaatg

SEQ ID NO: 897 - DNA, 20 bp, Artificial Sequence
  Synthetic: rene_0895_DPPA3
ccctctatcggaagctttac

SEQ ID NO: 898 - DNA, 20 bp, Artificial Sequence
  Synthetic: rene_0896_DPPA3
atccaacctacatcccaggg

SEQ ID NO: 899 - DNA, 20 bp, Artificial Sequence
  Synthetic: rene_0897_DPPA3
cagcaggagaggagtaagaa

SEQ ID NO: 900 - DNA, 20 bp, Artificial Sequence
  Synthetic: rene_0898_DPPA3
tgcgtgtctaatggatggga

SEQ ID NO: 901 - DNA, 20 bp, Artificial Sequence
  Synthetic: rene_0899_DPPA3
ctccgtcgagagtctgtagg

SEQ ID NO: 902 - DNA, 20 bp, Artificial Sequence
  Synthetic: rene_0900_DPPA3
tggagaccctgggatgtagg

SEQ ID NO: 903 - DNA, 20 bp, Artificial Sequence
  Synthetic: rene_0901_DQX1
gtagtaacaccagggagctc

SEQ ID NO: 904 - DNA, 20 bp, Artificial Sequence
  Synthetic: rene_0902_DQX1
cccgtcctccactcagtgca

SEQ ID NO: 905 - DNA, 20 bp, Artificial Sequence
  Synthetic: rene_0903_DQX1
accatatccaaagacaactg

SEQ ID NO: 906 - DNA, 20 bp, Artificial Sequence
  Synthetic: rene_0904_DQX1
actgtgtggacgagatgctc

SEQ ID NO: 907 - DNA, 20 bp, Artificial Sequence
  Synthetic: rene_0905_DQX1
cctgtgctgtgaatccttgt

SEQ ID NO: 908 - DNA, 20 bp, Artificial Sequence
  Synthetic: rene_0906_DQX1
gactatctggcagccctgga

SEQ ID NO: 909 - DNA, 20 bp, Artificial Sequence
  Synthetic: rene_0907_DQX1
caatcctaggatccgagcag

SEQ ID NO: 910 - DNA, 20 bp, Artificial Sequence
  Synthetic: rene_0908_DQX1
ctccctgctgtagaatctgc

SEQ ID NO: 911 - DNA, 20 bp, Artificial Sequence
  Synthetic: rene_0909_DUSP1
agggtcactaccagtacaag

SEQ ID NO: 912 - DNA, 20 bp, Artificial Sequence
  Synthetic: rene_0910_DUSP1
ccggtcagccaccatctgcc

SEQ ID NO: 913 - DNA, 20 bp, Artificial Sequence
  Synthetic: rene_0911_DUSP1
tgaagcagaggcgaagcatc

SEQ ID NO: 914 - DNA, 20 bp, Artificial Sequence
  Synthetic: rene_0912_DUSP1
ggcttcctgcccggagctgt

SEQ ID NO: 915 - DNA, 20 bp, Artificial Sequence
  Synthetic: rene_0913_DUSP1
agtcccaggtgctggctccg

SEQ ID NO: 916 - DNA, 20 bp, Artificial Sequence
  Synthetic: rene_0914_DUSP1
tccactgccaggcaggcatt

SEQ ID NO: 917 - DNA, 20 bp, Artificial Sequence
  Synthetic: rene_0915_DUSP1
ctgcacagctccgggcagga

SEQ ID NO: 918 - DNA, 20 bp, Artificial Sequence
  Synthetic: rene_0916_DUSP1
tgtacctgggcagtgcgtat

SEQ ID NO: 919 - DNA, 20 bp, Artificial Sequence
  Synthetic: rene_0917_DUSP10
tgatgagaataccaatgaac

SEQ ID NO: 920 - DNA, 20 bp, Artificial Sequence
  Synthetic: rene_0918_DUSP10
ggtcttcctcgaactctagc

SEQ ID NO: 921 - DNA, 20 bp, Artificial Sequence
  Synthetic: rene_0919_DUSP10
atggttctgcttaaaactac

SEQ ID NO: 922 - DNA, 20 bp, Artificial Sequence
  Synthetic: rene_0920_DUSP10
agcagaaccatgaaaacctc

SEQ ID NO: 923 - DNA, 20 bp, Artificial Sequence
  Synthetic: rene_0921_DUSP10
gtgtaaggattctcggtgtc

SEQ ID NO: 924 - DNA, 20 bp, Artificial Sequence
  Synthetic: rene_0922_DUSP10
ctgtagggaaggcaaggact

SEQ ID NO: 925 - DNA, 20 bp, Artificial Sequence
  Synthetic: rene_0923_DUSP10
gactctagttaccttggctc

SEQ ID NO: 926 - DNA, 20 bp, Artificial Sequence
  Synthetic: rene_0924_DUSP10
taagcatcagtcatggtcat

SEQ ID NO: 927 - DNA, 20 bp, Artificial Sequence
  Synthetic: rene_0925_DYNLT3
ggtggtgaagattataatca

SEQ ID NO: 928 - DNA, 20 bp, Artificial Sequence
  Synthetic: rene_0926_DYNLT3
ccaacttaaccaggtgtgtt

SEQ ID NO: 929 - DNA, 20 bp, Artificial Sequence
  Synthetic: rene_0927_DYNLT3
acacagccagctcctgtttt

SEQ ID NO: 930 - DNA, 20 bp, Artificial Sequence
  Synthetic: rene_0928_DYNLT3
acaatattgtgggcttcctc

SEQ ID NO: 931 - DNA, 20 bp, Artificial Sequence
  Synthetic: rene_0929_DYNLT3
taggcttttcccaacttaac

SEQ ID NO: 932 - DNA, 20 bp, Artificial Sequence
  Synthetic: rene_0930_EFNB1
ggatagatcaccaagccctt

SEQ ID NO: 933 - DNA, 20 bp, Artificial Sequence
  Synthetic: rene_0931_EFNB1
ccatcaagttccaggagttc

SEQ ID NO: 934 - DNA, 20 bp, Artificial Sequence
  Synthetic: rene_0932_EFNB1
cagcccctccaggcttccat

SEQ ID NO: 935 - DNA, 20 bp, Artificial Sequence
  Synthetic: rene_0933_EFNB1
ctgctctggcctattgcagg

SEQ ID NO: 936 - DNA, 20 bp, Artificial Sequence
  Synthetic: rene_0934_EFNB3
gggggacagcccctcctcgg

SEQ ID NO: 937 - DNA, 20 bp, Artificial Sequence
  Synthetic: rene_0935_EFNB3
gggcagggggtgcctcacag

SEQ ID NO: 938 - DNA, 20 bp, Artificial Sequence
  Synthetic: rene_0936_EFNB3
gagggctctgggggggccca

SEQ ID NO: 939 - DNA, 20 bp, Artificial Sequence
  Synthetic: rene_0937_EFNB3
catgggcatttcagacacag

SEQ ID NO: 940 - DNA, 20 bp, Artificial Sequence
  Synthetic: rene_0938_EFNB3
tcccactcggagaagcacct

SEQ ID NO: 941 - DNA, 20 bp, Artificial Sequence
  Synthetic: rene_0939_EFNB3
gggctggtgtctgggctcag

SEQ ID NO: 942 - DNA, 20 bp, Artificial Sequence
  Synthetic: rene_0940_EFNB3
agacacaggttttcggggga

SEQ ID NO: 943 - DNA, 20 bp, Artificial Sequence
  Synthetic: rene_0941_EGR2
tgcaccagctgtctgacaac

SEQ ID NO: 944 - DNA, 20 bp, Artificial Sequence
  Synthetic: rene_0942_EGR2
cccggagtgatgagaggaag

SEQ ID NO: 945 - DNA, 20 bp, Artificial Sequence
  Synthetic: rene_0943_EGR2
taggtgcagagacgggagca

SEQ ID NO: 946 - DNA, 20 bp, Artificial Sequence
  Synthetic: rene_0944_EGR2
cctgcccactggacaccctg

SEQ ID NO: 947 - DNA, 20 bp, Artificial Sequence
  Synthetic: rene_0945_EGR2
ctcccgtctctgcacctaga

SEQ ID NO: 948 - DNA, 20 bp, Artificial Sequence
  Synthetic: rene_0946_EGR2
tctacggccttggcggtcat

SEQ ID NO: 949 - DNA, 20 bp, Artificial Sequence
  Synthetic: rene_0947_EGR2
ccctggggggccccagtgct

SEQ ID NO: 950 - DNA, 20 bp, Artificial Sequence
  Synthetic: rene_0948_EGR2
ggccacagtagtcacaggcg

SEQ ID NO: 951 - DNA, 20 bp, Artificial Sequence
  Synthetic: rene_0949_EHMT1
acaagacccattggtctcac

SEQ ID NO: 952 - DNA, 20 bp, Artificial Sequence
  Synthetic: rene_0950_EHMT1
tctggactccctggatctcc

SEQ ID NO: 953 - DNA, 20 bp, Artificial Sequence
  Synthetic: rene_0951_EHMT1
gcagctgcagtatctcggaa

SEQ ID NO: 954 - DNA, 20 bp, Artificial Sequence
  Synthetic: rene_0952_EHMT1
agagcataactcattccact

SEQ ID NO: 955 - DNA, 20 bp, Artificial Sequence
  Synthetic: rene_0953_EHMT1
ccccccttcccatcccttca

SEQ ID NO: 956 - DNA, 20 bp, Artificial Sequence
  Synthetic: rene_0954_EHMT1
ttaggaaccaggctataggt

SEQ ID NO: 957 - DNA, 20 bp, Artificial Sequence
  Synthetic: rene_0955_EHMT1
ttccgagatactgcagctgc

SEQ ID NO: 958 - DNA, 20 bp, Artificial Sequence
  Synthetic: rene_0956_EHMT1
tcaagaggaaaggaaagacc

SEQ ID NO: 959 - DNA, 20 bp, Artificial Sequence
  Synthetic: rene_0957_EHMT2
gctatgaggctactgagtat

SEQ ID NO: 960 - DNA, 20 bp, Artificial Sequence
  Synthetic: rene_0958_EHMT2
gagtgtaaccaggcgtgctc

SEQ ID NO: 961 - DNA, 20 bp, Artificial Sequence
  Synthetic: rene_0959_EHMT2
ccagtgagtggacatcatca

SEQ ID NO: 962 - DNA, 20 bp, Artificial Sequence
  Synthetic: rene_0960_EHMT2
atgtcccagaagcggtcgcc

SEQ ID NO: 963 - DNA, 20 bp, Artificial Sequence
  Synthetic: rene_0961_EHMT2
ccaccccaagtcggagcttg

SEQ ID NO: 964 - DNA, 20 bp, Artificial Sequence
  Synthetic: rene_0962_EHMT2
ggggacacccctcgtagtga

SEQ ID NO: 965 - DNA, 20 bp, Artificial Sequence
  Synthetic: rene_0963_EHMT2
acctgccaatgtggctctga

SEQ ID NO: 966 - DNA, 20 bp, Artificial Sequence
  Synthetic: rene_0964_EHMT2
actatggcgaccgcttctgg

SEQ ID NO: 967 - DNA, 20 bp, Artificial Sequence
  Synthetic: rene_0965_ELP3
gtaggatcccggctgctcac

SEQ ID NO: 968 - DNA, 20 bp, Artificial Sequence
  Synthetic: rene_0966_ELP3
ccagacccatgttcttctct

SEQ ID NO: 969 - DNA, 20 bp, Artificial Sequence
  Synthetic: rene_0967_ELP3
catgatgccttatcaggaca

SEQ ID NO: 970 - DNA, 20 bp, Artificial Sequence
  Synthetic: rene_0968_ELP3
gaataaaataatctctgtat

SEQ ID NO: 971 - DNA, 20 bp, Artificial Sequence
  Synthetic: rene_0969_ELP3
ctacagacaagacaccgaat

SEQ ID NO: 972 - DNA, 20 bp, Artificial Sequence
  Synthetic: rene_0970_ELP3
ccagccaccatttgcaacat

SEQ ID NO: 973 - DNA, 20 bp, Artificial Sequence
  Synthetic: rene_0971_ELP3
ctgtaaaactgatgtgtgga

SEQ ID NO: 974 - DNA, 20 bp, Artificial Sequence
  Synthetic: rene_0972_ELP3
agtattccacccagtcttac

SEQ ID NO: 975 - DNA, 20 bp, Artificial Sequence
  Synthetic: rene_0973_ENTPD1
atatgggactatgctgaacc

SEQ ID NO: 976 - DNA, 20 bp, Artificial Sequence
  Synthetic: rene_0974_ENTPD1
cctgggagccacggcaggca

SEQ ID NO: 977 - DNA, 20 bp, Artificial Sequence
  Synthetic: rene_0975_ENTPD1
gcctctatggcaaggactac

SEQ ID NO: 978 - DNA, 20 bp, Artificial Sequence
  Synthetic: rene_0976_ENTPD1
cctgactgattgcatggaaa

SEQ ID NO: 979 - DNA, 20 bp, Artificial Sequence
  Synthetic: rene_0977_ENTPD1
gggtacaaaagtgacttgtg

SEQ ID NO: 980 - DNA, 20 bp, Artificial Sequence
  Synthetic: rene_0978_ENTPD1
caagaccccctgcaccaaga

SEQ ID NO: 981 - DNA, 20 bp, Artificial Sequence
  Synthetic: rene_0979_ENTPD1
agatgactcttccattccag

SEQ ID NO: 982 - DNA, 20 bp, Artificial Sequence
  Synthetic: rene_0980_ENTPD1
tggtacctacattctctccc

SEQ ID NO: 983 - DNA, 20 bp, Artificial Sequence
  Synthetic: rene_0981_EOMES
gtaggcagtcactgcaatga

SEQ ID NO: 984 - DNA, 20 bp, Artificial Sequence
  Synthetic: rene_0982_EOMES
ccttctcagaaacgcaattc

SEQ ID NO: 985 - DNA, 20 bp, Artificial Sequence
  Synthetic: rene_0983_EOMES
cctcaagcccgctattataa

SEQ ID NO: 986 - DNA, 20 bp, Artificial Sequence
  Synthetic: rene_0984_EOMES
tgttgaagctcaagaaagga

SEQ ID NO: 987 - DNA, 20 bp, Artificial Sequence
  Synthetic: rene_0985_EOMES
atggaagggggtgtctctat

SEQ ID NO: 988 - DNA, 20 bp, Artificial Sequence
  Synthetic: rene_0986_EOMES
tgagaaggtaaaagtctggg

SEQ ID NO: 989 - DNA, 20 bp, Artificial Sequence
  Synthetic: rene_0987_EOMES
ctatactcttcagcattaat

SEQ ID NO: 990 - DNA, 20 bp, Artificial Sequence
  Synthetic: rene_0988_EOMES
attactggagttgctaggag

SEQ ID NO: 991 - DNA, 20 bp, Artificial Sequence
  Synthetic: rene_0989_EP300
gtgttatagcaggtgataca

SEQ ID NO: 992 - DNA, 20 bp, Artificial Sequence
  Synthetic: rene_0990_EP300
atgatagactgcagtcctca

SEQ ID NO: 993 - DNA, 20 bp, Artificial Sequence
  Synthetic: rene_0991_EP300
cccacagacaagttccccac

SEQ ID NO: 994 - DNA, 20 bp, Artificial Sequence
  Synthetic: rene_0992_EP300
actggagcacccgttggact

SEQ ID NO: 995 - DNA, 20 bp, Artificial Sequence
  Synthetic: rene_0993_EP300
agggggagacacacaggaca

SEQ ID NO: 996 - DNA, 20 bp, Artificial Sequence
  Synthetic: rene_0994_EP300
ggacggaagaaatgaacact

SEQ ID NO: 997 - DNA, 20 bp, Artificial Sequence
  Synthetic: rene_0995_EP300
aaaccagaagaactacgaca

SEQ ID NO: 998 - DNA, 20 bp, Artificial Sequence
  Synthetic: rene_0996_EP300
gaagatcctgagtaatatct

SEQ ID NO: 999 - DNA, 20 bp, Artificial Sequence
  Synthetic: rene_0997_EZH1
atgccacccctaatgtatat

SEQ ID NO: 1000 - DNA, 20 bp, Artificial Sequence
  Synthetic: rene_0998_EZH1
ctgtaaaaactgcagcatcc

SEQ ID NO: 1001 - DNA, 20 bp, Artificial Sequence
  Synthetic: rene_0999_EZH1
caggaaaccaccttgcagtc

SEQ ID NO: 1002 - DNA, 20 bp, Artificial Sequence
  Synthetic: rene_1000_EZH1
gagtcttccatggcacctac

SEQ ID NO: 1003 - DNA, 20 bp, Artificial Sequence
  Synthetic: rene_1001_EZH1
cctgaagccgtttaagttgt

SEQ ID NO: 1004 - DNA, 20 bp, Artificial Sequence
  Synthetic: rene_1002_EZH1
cagtcaaagaatcacttatc

SEQ ID NO: 1005 - DNA, 20 bp, Artificial Sequence
  Synthetic: rene_1003_EZH1
cctggctgtcgctgtaagac

SEQ ID NO: 1006 - DNA, 20 bp, Artificial Sequence
  Synthetic: rene_1004_EZH1
agttgtcgaagtcgcatgta

SEQ ID NO: 1007 - DNA, 20 bp, Artificial Sequence
  Synthetic: rene_1005_EZH2
cttggaggagtatccacatc

SEQ ID NO: 1008 - DNA, 20 bp, Artificial Sequence
  Synthetic: rene_1006_EZH2
gagtcaaagaatctagcatc

SEQ ID NO: 1009 - DNA, 20 bp, Artificial Sequence
  Synthetic: rene_1007_EZH2
atgcaacacccaacacttat

SEQ ID NO: 1010 - DNA, 20 bp, Artificial Sequence
  Synthetic: rene_1008_EZH2
aatatgactgcttcctacat

SEQ ID NO: 1011 - DNA, 20 bp, Artificial Sequence
  Synthetic: rene_1009_EZH2
agtccctgcttccctatcac

SEQ ID NO: 1012 - DNA, 20 bp, Artificial Sequence
  Synthetic: rene_1010_EZH2
gagtcctcattggcacttac

SEQ ID NO: 1013 - DNA, 20 bp, Artificial Sequence
  Synthetic: rene_1011_EZH2
ccaagagagccatccagact

SEQ ID NO: 1014 - DNA, 20 bp, Artificial Sequence
  Synthetic: rene_1012_EZH2
gtcccaattaacctagcaat

SEQ ID NO: 1015 - DNA, 20 bp, Artificial Sequence
  Synthetic: rene_1013_FABP3
cctccatccagtgtcacaat

SEQ ID NO: 1016 - DNA, 20 bp, Artificial Sequence
  Synthetic: rene_1014_FABP3
gggtgagaatgtccccattc

SEQ ID NO: 1017 - DNA, 20 bp, Artificial Sequence
  Synthetic: rene_1015_FABP3
ctgggcacctggaagctagt

SEQ ID NO: 1018 - DNA, 20 bp, Artificial Sequence
  Synthetic: rene_1016_FABP3
ctaccaggcaggtggccagc

SEQ ID NO: 1019 - DNA, 20 bp, Artificial Sequence
  Synthetic: rene_1017_FABP3
tcataagtgcgagtgcaaac

SEQ ID NO: 1020 - DNA, 20 bp, Artificial Sequence
  Synthetic: rene_1018_FABP3
catcaattagctcccgcaca

SEQ ID NO: 1021 - DNA, 20 bp, Artificial Sequence
  Synthetic: rene_1019_FABP3
tgcaggtgaacaagtttccc

SEQ ID NO: 1022 - DNA, 20 bp, Artificial Sequence
  Synthetic: rene_1020_FABP3
gatgattgtggtaggcttgg

SEQ ID NO: 1023 - DNA, 20 bp, Artificial Sequence
  Synthetic: rene_1021_FASLG
atggttctggttgccttggt

SEQ ID NO: 1024 - DNA, 20 bp, Artificial Sequence
  Synthetic: rene_1022_FASLG
attgatcacaaggccaccct

SEQ ID NO: 1025 - DNA, 20 bp, Artificial Sequence
  Synthetic: rene_1023_FASLG
tatgtcaacgtatctgagct

SEQ ID NO: 1026 - DNA, 20 bp, Artificial Sequence
  Synthetic: rene_1024_FASLG
gaatatacaaagtacagccc

SEQ ID NO: 1027 - DNA, 20 bp, Artificial Sequence
  Synthetic: rene_1025_FASLG
agctcttccacctacagaag

SEQ ID NO: 1028 - DNA, 20 bp, Artificial Sequence
  Synthetic: rene_1026_FASLG
tggagtgaagtataagaagg

SEQ ID NO: 1029 - DNA, 20 bp, Artificial Sequence
  Synthetic: rene_1027_FASLG
tatattccaaagtatacttc

SEQ ID NO: 1030 - DNA, 20 bp, Artificial Sequence
  Synthetic: rene_1028_FASLG
accaggccttctgggcacag

SEQ ID NO: 1031 - DNA, 20 bp, Artificial Sequence
  Synthetic: rene_1029_FKBP14
gaatctccaggagatcaata

SEQ ID NO: 1032 - DNA, 20 bp, Artificial Sequence
  Synthetic: rene_1030_FKBP14
catataaacacgatgagtta

SEQ ID NO: 1033 - DNA, 20 bp, Artificial Sequence
  Synthetic: rene_1031_FKBP14
catagcccagagcaggagga

SEQ ID NO: 1034 - DNA, 20 bp, Artificial Sequence
  Synthetic: rene_1032_FKBP14
cagtcatcattaagatccat

SEQ ID NO: 1035 - DNA, 20 bp, Artificial Sequence
  Synthetic: rene_1033_FKBP14
acttctggttcagggatcaa

SEQ ID NO: 1036 - DNA, 20 bp, Artificial Sequence
  Synthetic: rene_1034_FKBP14
ccctgggcatcctggaggct

SEQ ID NO: 1037 - DNA, 20 bp, Artificial Sequence
  Synthetic: rene_1035_FKBP14
tatgtaaattctctggcaga

SEQ ID NO: 1038 - DNA, 20 bp, Artificial Sequence
  Synthetic: rene_1036_FKBP14
tcttctctcctacacacatt

SEQ ID NO: 1039 - DNA, 20 bp, Artificial Sequence
  Synthetic: rene_1037_FKBP7
tcccaaggaatacaatgtat

SEQ ID NO: 1040 - DNA, 20 bp, Artificial Sequence
  Synthetic: rene_1038_FKBP7
tccagggcacatatctgtca

SEQ ID NO: 1041 - DNA, 20 bp, Artificial Sequence
  Synthetic: rene_1039_FKBP7
gagagctgcctgtcattgtc

SEQ ID NO: 1042 - DNA, 20 bp, Artificial Sequence
  Synthetic: rene_1040_FKBP7
gtaggtctcccttcttgctt

SEQ ID NO: 1043 - DNA, 20 bp, Artificial Sequence
  Synthetic: rene_1041_FKBP7
ctgctcagagacaaaagaaa

SEQ ID NO: 1044 - DNA, 20 bp, Artificial Sequence
  Synthetic: rene_1042_FKBP7
agaagaatgaccatgatggt

SEQ ID NO: 1045 - DNA, 20 bp, Artificial Sequence
  Synthetic: rene_1043_FKBP7
tgacttgcccaacaccaaga

SEQ ID NO: 1046 - DNA, 20 bp, Artificial Sequence
  Synthetic: rene_1044_FKBP7
catcgtccagaaaactgctc

SEQ ID NO: 1047 - DNA, 20 bp, Artificial Sequence
  Synthetic: rene_1045_FMR1
gtgtggacactcctttcatt

SEQ ID NO: 1048 - DNA, 20 bp, Artificial Sequence
  Synthetic: rene_1046_FMR1
gctaaccaccaacagcaagg

SEQ ID NO: 1049 - DNA, 20 bp, Artificial Sequence
  Synthetic: rene_1047_FMR1
gtggtggtctagaactagct

SEQ ID NO: 1050 - DNA, 20 bp, Artificial Sequence
  Synthetic: rene_1048_FMR1
gatataaaggaaaacagcac

SEQ ID NO: 1051 - DNA, 20 bp, Artificial Sequence
  Synthetic: rene_1049_FMR1
agcctcaatcctcaccctca

SEQ ID NO: 1052 - DNA, 20 bp, Artificial Sequence
  Synthetic: rene_1050_FMR1
atgatgtcagattcccacct

SEQ ID NO: 1053 - DNA, 20 bp, Artificial Sequence
  Synthetic: rene_1051_FMR1
tgtgatagaatatgcagcat

SEQ ID NO: 1054 - DNA, 20 bp, Artificial Sequence
  Synthetic: rene_1052_FMR1
cccgtgcgcagccgactacc

SEQ ID NO: 1055 - DNA, 20 bp, Artificial Sequence
  Synthetic: rene_1053_FSD1
acatgaaatacatgaacttc

SEQ ID NO: 1056 - DNA, 20 bp, Artificial Sequence
  Synthetic: rene_1054_FSD1
agggagtagataaagctctg

SEQ ID NO: 1057 - DNA, 20 bp, Artificial Sequence
  Synthetic: rene_1055_FSD1
gtgcgggcattgtagaagga

SEQ ID NO: 1058 - DNA, 20 bp, Artificial Sequence
  Synthetic: rene_1056_FSD1
tcttcataagcatgccttct

SEQ ID NO: 1059 - DNA, 20 bp, Artificial Sequence
  Synthetic: rene_1057_FSD1
tctactccctgaaacagatg

SEQ ID NO: 1060 - DNA, 20 bp, Artificial Sequence
  Synthetic: rene_1058_FSD1
agctcctccaggagggagaa

SEQ ID NO: 1061 - DNA, 20 bp, Artificial Sequence
  Synthetic: rene_1059_FSD1
caggcagcgcacagcactgg

SEQ ID NO: 1062 - DNA, 20 bp, Artificial Sequence
  Synthetic: rene_1060_FSD1
aagaccaggttcacacagcc

SEQ ID NO: 1063 - DNA, 20 bp, Artificial Sequence
  Synthetic: rene_1061_FXR2
ttggcacccgagagaacatc

SEQ ID NO: 1064 - DNA, 20 bp, Artificial Sequence
  Synthetic: rene_1062_FXR2
gtgcgcaggcttcggaaatg

SEQ ID NO: 1065 - DNA, 20 bp, Artificial Sequence
  Synthetic: rene_1063_FXR2
aaagaagatggtgacagagt

SEQ ID NO: 1066 - DNA, 20 bp, Artificial Sequence
  Synthetic: rene_1064_FXR2
tccacaatctcctggatcac

SEQ ID NO: 1067 - DNA, 20 bp, Artificial Sequence
  Synthetic: rene_1065_FXR2
tgaggactcagtgcaagtgc

SEQ ID NO: 1068 - DNA, 20 bp, Artificial Sequence
  Synthetic: rene_1066_FXR2
attgtaggtggcatcacagg

SEQ ID NO: 1069 - DNA, 20 bp, Artificial Sequence
  Synthetic: rene_1067_FXR2
gggatgtccggctaccacct

SEQ ID NO: 1070 - DNA, 20 bp, Artificial Sequence
  Synthetic: rene_1068_FXR2
ctggagtatcacctctccta

SEQ ID NO: 1071 - DNA, 20 bp, Artificial Sequence
  Synthetic: rene_1069_FYN
atatcatcccaatcacggat

SEQ ID NO: 1072 - DNA, 20 bp, Artificial Sequence
  Synthetic: rene_1070_FYN
actctcgcggataagaaagg

SEQ ID NO: 1073 - DNA, 20 bp, Artificial Sequence
  Synthetic: rene_1071_FYN
agagctcttccttctccatc

SEQ ID NO: 1074 - DNA, 20 bp, Artificial Sequence
  Synthetic: rene_1072_FYN
acttaactgtgattgcatcg

SEQ ID NO: 1075 - DNA, 20 bp, Artificial Sequence
  Synthetic: rene_1073_FYN
ccagtctcttgatcaactgc

SEQ ID NO: 1076 - DNA, 20 bp, Artificial Sequence
  Synthetic: rene_1074_FYN
ctgatcgcagatctctatgg

SEQ ID NO: 1077 - DNA, 20 bp, Artificial Sequence
  Synthetic: rene_1075_FYN
acaaaggagaaaaatttcaa

SEQ ID NO: 1078 - DNA, 20 bp, Artificial Sequence
  Synthetic: rene_1076_FYN
acatggtctcctttcatatc

SEQ ID NO: 1079 - DNA, 20 bp, Artificial Sequence
  Synthetic: rene_1077_G2E3
ggtgtacaatatgcaataat

SEQ ID NO: 1080 - DNA, 20 bp, Artificial Sequence
  Synthetic: rene_1078_G2E3
ggtgatgactcttccaacaa

SEQ ID NO: 1081 - DNA, 20 bp, Artificial Sequence
  Synthetic: rene_1079_G2E3
gaagaaatgtatcaacacta

SEQ ID NO: 1082 - DNA, 20 bp, Artificial Sequence
  Synthetic: rene_1080_G2E3
ctgttggaaacaagtgtaat

SEQ ID NO: 1083 - DNA, 20 bp, Artificial Sequence
  Synthetic: rene_1081_G2E3
cagtacacacattacctgat

SEQ ID NO: 1084 - DNA, 20 bp, Artificial Sequence
  Synthetic: rene_1082_G2E3
ccatgtggacttcagagaga

SEQ ID NO: 1085 - DNA, 20 bp, Artificial Sequence
  Synthetic: rene_1083_G2E3
gcaattcccatcaccaatac

SEQ ID NO: 1086 - DNA, 20 bp, Artificial Sequence
  Synthetic: rene_1084_G2E3
gaagtgagcatcctggatca

SEQ ID NO: 1087 - DNA, 20 bp, Artificial Sequence
  Synthetic: rene_1085_GABBR1
tatgagactgaagcccggaa

SEQ ID NO: 1088 - DNA, 20 bp, Artificial Sequence
  Synthetic: rene_1086_GABBR1
acgggcacagctggatctga

SEQ ID NO: 1089 - DNA, 20 bp, Artificial Sequence
  Synthetic: rene_1087_GABBR1
ggaagaagtacgtctggttc

SEQ ID NO: 1090 - DNA, 20 bp, Artificial Sequence
  Synthetic: rene_1088_GABBR1
ttctcagatccagctgtgcc

SEQ ID NO: 1091 - DNA, 20 bp, Artificial Sequence
  Synthetic: rene_1089_GABBR1
cgggcttcagtctcatagaa

SEQ ID NO: 1092 - DNA, 20 bp, Artificial Sequence
  Synthetic: rene_1090_GABBR1
cgccagagtttcttctcaga

SEQ ID NO: 1093 - DNA, 20 bp, Artificial Sequence
  Synthetic: rene_1091_GABBR1
tggagaaactaaccaagcga

SEQ ID NO: 1094 - DNA, 20 bp, Artificial Sequence
  Synthetic: rene_1092_GABBR1
agtcgcttggttagtttctc

SEQ ID NO: 1095 - DNA, 20 bp, Artificial Sequence
  Synthetic: rene_1093_GAS2
ccagagacaatacagcaaat

SEQ ID NO: 1096 - DNA, 20 bp, Artificial Sequence
  Synthetic: rene_1094_GAS2
ggggtggatgaaacgtgtct

SEQ ID NO: 1097 - DNA, 20 bp, Artificial Sequence
  Synthetic: rene_1095_GAS2
ccagcctcctcccacacgga

SEQ ID NO: 1098 - DNA, 20 bp, Artificial Sequence
  Synthetic: rene_1096_GAS2
atccacccctaaatctcggc

SEQ ID NO: 1099 - DNA, 20 bp, Artificial Sequence
  Synthetic: rene_1097_GAS2
ccatccacacgggagatctg

SEQ ID NO: 1100 - DNA, 20 bp, Artificial Sequence
  Synthetic: rene_1098_GAS2
aacaaataccctgcaaaagt

SEQ ID NO: 1101 - DNA, 20 bp, Artificial Sequence
  Synthetic: rene_1099_GAS2
ctgtattgtctctggcaaaa

SEQ ID NO: 1102 - DNA, 20 bp, Artificial Sequence
  Synthetic: rene_1100_GAS2
ctaccaatgaaagaagatct

SEQ ID NO: 1103 - DNA, 20 bp, Artificial Sequence
  Synthetic: rene_1101_GLYR1
gcttagcaggaaatgatgga

SEQ ID NO: 1104 - DNA, 20 bp, Artificial Sequence
  Synthetic: rene_1102_GLYR1
aatggcagccaaccgcaagc

SEQ ID NO: 1105 - DNA, 20 bp, Artificial Sequence
  Synthetic: rene_1103_GLYR1
tctgtgggtgtgatgctgcc

SEQ ID NO: 1106 - DNA, 20 bp, Artificial Sequence
  Synthetic: rene_1104_GLYR1
gcaagttggagacgattcca

SEQ ID NO: 1107 - DNA, 20 bp, Artificial Sequence
  Synthetic: rene_1105_GLYR1
gcctacttctctcctcactg

SEQ ID NO: 1108 - DNA, 20 bp, Artificial Sequence
  Synthetic: rene_1106_GLYR1
agaggggatttggagcctct

SEQ ID NO: 1109 - DNA, 20 bp, Artificial Sequence
  Synthetic: rene_1107_GLYR1
gagcctctctctgaagagcc

SEQ ID NO: 1110 - DNA, 20 bp, Artificial Sequence
  Synthetic: rene_1108_GLYR1
gctctcctgaggaactcttc

SEQ ID NO: 1111 - DNA, 20 bp, Artificial Sequence
  Synthetic: rene_1109_GPD2
acgtgagagccaaatgtgtt

SEQ ID NO: 1112 - DNA, 20 bp, Artificial Sequence
  Synthetic: rene_1110_GPD2
gttgcaggaagcaattgcct

SEQ ID NO: 1113 - DNA, 20 bp, Artificial Sequence
  Synthetic: rene_1111_GPD2
gggagatagactgagtatct

SEQ ID NO: 1114 - DNA, 20 bp, Artificial Sequence
  Synthetic: rene_1112_GPD2
aaagcaggaccaagtagaac

SEQ ID NO: 1115 - DNA, 20 bp, Artificial Sequence
  Synthetic: rene_1113_GPD2
gccacctcaaaggccttatc

SEQ ID NO: 1116 - DNA, 20 bp, Artificial Sequence
  Synthetic: rene_1114_GPD2
atgcagaccagaaaggcttt

SEQ ID NO: 1117 - DNA, 20 bp, Artificial Sequence
  Synthetic: rene_1115_GPD2
ccagggtaagaagaaaataa

SEQ ID NO: 1118 - DNA, 20 bp, Artificial Sequence
  Synthetic: rene_1116_GPD2
ccaatgctccagaaggacaa

SEQ ID NO: 1119 - DNA, 20 bp, Artificial Sequence
  Synthetic: rene_1117_GPR162
gtccccccaccaccccccac

SEQ ID NO: 1120 - DNA, 20 bp, Artificial Sequence
  Synthetic: rene_1118_GPR162
tctatgactcactcacaggg

SEQ ID NO: 1121 - DNA, 20 bp, Artificial Sequence
  Synthetic: rene_1119_GPR162
atgctaacggagccacagga

SEQ ID NO: 1122 - DNA, 20 bp, Artificial Sequence
  Synthetic: rene_1120_GPR162
aggtaccagccattgtggtg

SEQ ID NO: 1123 - DNA, 20 bp, Artificial Sequence
  Synthetic: rene_1121_GPR162
ggactaagcgcagggagacg

SEQ ID NO: 1124 - DNA, 20 bp, Artificial Sequence
  Synthetic: rene_1122_GPR162
ttcaccccccgtcagggagc

SEQ ID NO: 1125 - DNA, 20 bp, Artificial Sequence
  Synthetic: rene_1123_GPR162
tcccaggtactcaggaggac

SEQ ID NO: 1126 - DNA, 20 bp, Artificial Sequence
  Synthetic: rene_1124_GPR162
cttcagcctcttgctacttg

SEQ ID NO: 1127 - DNA, 20 bp, Artificial Sequence
  Synthetic: rene_1125_GPR180
actacagctataaccatgac

SEQ ID NO: 1128 - DNA, 20 bp, Artificial Sequence
  Synthetic: rene_1126_GPR180
ctcctagtcctagtgtactt

SEQ ID NO: 1129 - DNA, 20 bp, Artificial Sequence
  Synthetic: rene_1127_GPR180
aagatatcagtcatcatagc

SEQ ID NO: 1130 - DNA, 20 bp, Artificial Sequence
  Synthetic: rene_1128_GPR180
tgcagacaagtatacatgcc

SEQ ID NO: 1131 - DNA, 20 bp, Artificial Sequence
  Synthetic: rene_1129_GPR180
agtgtacttctctccactgt

SEQ ID NO: 1132 - DNA, 20 bp, Artificial Sequence
  Synthetic: rene_1130_GPR180
gtaacaccatttcaaatggg

SEQ ID NO: 1133 - DNA, 20 bp, Artificial Sequence
  Synthetic: rene_1131_GPR180
agtctatgcatgggttggac

SEQ ID NO: 1134 - DNA, 20 bp, Artificial Sequence
  Synthetic: rene_1132_GPR180
gtagtcgctaaaaatgacag

SEQ ID NO: 1135 - DNA, 20 bp, Artificial Sequence
  Synthetic: rene_1133_GPR65
ggttacaaaacagtacagaa

SEQ ID NO: 1136 - DNA, 20 bp, Artificial Sequence
  Synthetic: rene_1134_GPR65
atatattccacatatcatat

SEQ ID NO: 1137 - DNA, 20 bp, Artificial Sequence
  Synthetic: rene_1135_GPR65
ctctatgcattaactctccc

SEQ ID NO: 1138 - DNA, 20 bp, Artificial Sequence
  Synthetic: rene_1136_GPR65
atcttcccacaacatgacag

SEQ ID NO: 1139 - DNA, 20 bp, Artificial Sequence
  Synthetic: rene_1137_GPR65
gagcatgctgtgaacttcga

SEQ ID NO: 1140 - DNA, 20 bp, Artificial Sequence
  Synthetic: rene_1138_GPR65
gctgttgtctaccctttgaa

SEQ ID NO: 1141 - DNA, 20 bp, Artificial Sequence
  Synthetic: rene_1139_GPR65
ctaaggacaagaagatttgc

SEQ ID NO: 1142 - DNA, 20 bp, Artificial Sequence
  Synthetic: rene_1140_GPR65
tgtgtctacaaaagatacta

SEQ ID NO: 1143 - DNA, 20 bp, Artificial Sequence
  Synthetic: rene_1141_GRAP2
actgcccaagccggtgccac

SEQ ID NO: 1144 - DNA, 20 bp, Artificial Sequence
  Synthetic: rene_1142_GRAP2
acgaaggcctctctcgacac

SEQ ID NO: 1145 - DNA, 20 bp, Artificial Sequence
  Synthetic: rene_1143_GRAP2
agtaaccaagaggagtggtt

SEQ ID NO: 1146 - DNA, 20 bp, Artificial Sequence
  Synthetic: rene_1144_GRAP2
gggatggaaacttctcagtc

SEQ ID NO: 1147 - DNA, 20 bp, Artificial Sequence
  Synthetic: rene_1145_GRAP2
tcctgtagtagtctaccagc

SEQ ID NO: 1148 - DNA, 20 bp, Artificial Sequence
  Synthetic: rene_1146_GRAP2
actgcttcaggtgaggatga

SEQ ID NO: 1149 - DNA, 20 bp, Artificial Sequence
  Synthetic: rene_1147_GRAP2
catccctaaataagctggta

SEQ ID NO: 1150 - DNA, 20 bp, Artificial Sequence
  Synthetic: rene_1148_GRAP2
tgtggactgagaagtttcca

SEQ ID NO: 1151 - DNA, 20 bp, Artificial Sequence
  Synthetic: rene_1149_GRB2
cattaagctctgccttgtac

SEQ ID NO: 1152 - DNA, 20 bp, Artificial Sequence
  Synthetic: rene_1150_GRB2
tggagacagatgtagatctg

SEQ ID NO: 1153 - DNA, 20 bp, Artificial Sequence
  Synthetic: rene_1151_GRB2
aacgaagaatgtgatcagaa

SEQ ID NO: 1154 - DNA, 20 bp, Artificial Sequence
  Synthetic: rene_1152_GRB2
tccatgtcatggataactca

SEQ ID NO: 1155 - DNA, 20 bp, Artificial Sequence
  Synthetic: rene_1153_GRB2
cccgcaattatgtcaccccc

SEQ ID NO: 1156 - DNA, 20 bp, Artificial Sequence
  Synthetic: rene_1154_GRB2
gcaaaatccccagagccaag

SEQ ID NO: 1157 - DNA, 20 bp, Artificial Sequence
  Synthetic: rene_1155_GRB2
gaaacgatgtgcagcacttc

SEQ ID NO: 1158 - DNA, 20 bp, Artificial Sequence
  Synthetic: rene_1156_GRB2
tatgtagttcttgggaatga

SEQ ID NO: 1159 - DNA, 20 bp, Artificial Sequence
  Synthetic: rene_1157_GRIK5
cctcccagccaccgcccact

SEQ ID NO: 1160 - DNA, 20 bp, Artificial Sequence
  Synthetic: rene_1158_GRIK5
agactggagaaatgacagca

SEQ ID NO: 1161 - DNA, 20 bp, Artificial Sequence
  Synthetic: rene_1159_GRIK5
gccccacgggaccagcctca

SEQ ID NO: 1162 - DNA, 20 bp, Artificial Sequence
  Synthetic: rene_1160_GRIK5
ctcttgccccccactccagt

SEQ ID NO: 1163 - DNA, 20 bp, Artificial Sequence
  Synthetic: rene_1161_GRIK5
tccgcagcctcaacatgtcc

SEQ ID NO: 1164 - DNA, 20 bp, Artificial Sequence
  Synthetic: rene_1162_GRIK5
ctcctgcagcatcagttgtc

SEQ ID NO: 1165 - DNA, 20 bp, Artificial Sequence
  Synthetic: rene_1163_GRIK5
ctagcagcatggacggctcc

SEQ ID NO: 1166 - DNA, 20 bp, Artificial Sequence
  Synthetic: rene_1164_GRIK5
taggatgcgcagggtgtagt

SEQ ID NO: 1167 - DNA, 20 bp, Artificial Sequence
  Synthetic: rene_1165_GTF3C4
gtgggaatatgagcacaata

SEQ ID NO: 1168 - DNA, 20 bp, Artificial Sequence
  Synthetic: rene_1166_GTF3C4
agaggagacacagcatgcag

SEQ ID NO: 1169 - DNA, 20 bp, Artificial Sequence
  Synthetic: rene_1167_GTF3C4
gagagcctgtaactggtctc

SEQ ID NO: 1170 - DNA, 20 bp, Artificial Sequence
  Synthetic: rene_1168_GTF3C4
tgtgatccaggtgtgcagat

SEQ ID NO: 1171 - DNA, 20 bp, Artificial Sequence
  Synthetic: rene_1169_GTF3C4
atagacctagtacgctggaa

SEQ ID NO: 1172 - DNA, 20 bp, Artificial Sequence
  Synthetic: rene_1170_GTF3C4
atgtctgatgaagagtatga

SEQ ID NO: 1173 - DNA, 20 bp, Artificial Sequence
  Synthetic: rene_1171_GTF3C4
aaagaggacagccaggagca

SEQ ID NO: 1174 - DNA, 20 bp, Artificial Sequence
  Synthetic: rene_1172_GTF3C4
caagaagctttggaaaaaaa

SEQ ID NO: 1175 - DNA, 20 bp, Artificial Sequence
  Synthetic: rene_1173_HAT1
tctgggtacacatagtaatt

SEQ ID NO: 1176 - DNA, 20 bp, Artificial Sequence
  Synthetic: rene_1174_HAT1
gtagaatataagagtgcagt

SEQ ID NO: 1177 - DNA, 20 bp, Artificial Sequence
  Synthetic: rene_1175_HAT1
atatccagtctgtagcttct

SEQ ID NO: 1178 - DNA, 20 bp, Artificial Sequence
  Synthetic: rene_1176_HAT1
ccgggaaaaacagggcaaat

SEQ ID NO: 1179 - DNA, 20 bp, Artificial Sequence
  Synthetic: rene_1177_HAT1
gttacaagggtctaaagatc

SEQ ID NO: 1180 - DNA, 20 bp, Artificial Sequence
  Synthetic: rene_1178_HAT1
ctgaagatcttgaaaatgac

SEQ ID NO: 1181 - DNA, 20 bp, Artificial Sequence
  Synthetic: rene_1179_HAT1
ccgggaaaaattaatgcaag

SEQ ID NO: 1182 - DNA, 20 bp, Artificial Sequence
  Synthetic: rene_1180_HAT1
ttctccactgcactcttata

SEQ ID NO: 1183 - DNA, 20 bp, Artificial Sequence
  Synthetic: rene_1181_HDAC1
ggtagagaccatagttgagc

SEQ ID NO: 1184 - DNA, 20 bp, Artificial Sequence
  Synthetic: rene_1182_HDAC1
atgtagtcatcgctgtggta

SEQ ID NO: 1185 - DNA, 20 bp, Artificial Sequence
  Synthetic: rene_1183_HDAC1
aagctccacatcagtccttc

SEQ ID NO: 1186 - DNA, 20 bp, Artificial Sequence
  Synthetic: rene_1184_HDAC1
agttctgtcagttgtctact

SEQ ID NO: 1187 - DNA, 20 bp, Artificial Sequence
  Synthetic: rene_1185_HDAC1
gcagttccaggatggccaag

SEQ ID NO: 1188 - DNA, 20 bp, Artificial Sequence
  Synthetic: rene_1186_HDAC1
gcttctggcttctcctcctt

SEQ ID NO: 1189 - DNA, 20 bp, Artificial Sequence
  Synthetic: rene_1187_HDAC1
atagttagattgaagcaacc

SEQ ID NO: 1190 - DNA, 20 bp, Artificial Sequence
  Synthetic: rene_1188_HDAC1
ataagtatggagagtacttc

SEQ ID NO: 1191 - DNA, 20 bp, Artificial Sequence
  Synthetic: rene_1189_HDAC10
ctgcgagagtcagatgcaga

SEQ ID NO: 1192 - DNA, 20 bp, Artificial Sequence
  Synthetic: rene_1190_HDAC10
tgcttggcatgtgcagctgc

SEQ ID NO: 1193 - DNA, 20 bp, Artificial Sequence
  Synthetic: rene_1191_HDAC10
actcagccatcggggaccct

SEQ ID NO: 1194 - DNA, 20 bp, Artificial Sequence
  Synthetic: rene_1192_HDAC10
cacagctccagtgagcacag

SEQ ID NO: 1195 - DNA, 20 bp, Artificial Sequence
  Synthetic: rene_1193_HDAC10
accctgagctggtgctggtc

SEQ ID NO: 1196 - DNA, 20 bp, Artificial Sequence
  Synthetic: rene_1194_HDAC10
ctgagctgcatcttgggctt

SEQ ID NO: 1197 - DNA, 20 bp, Artificial Sequence
  Synthetic: rene_1195_HDAC10
cttctcctggcaccgctatg

SEQ ID NO: 1198 - DNA, 20 bp, Artificial Sequence
  Synthetic: rene_1196_HDAC10
actgcgcgcggctggccgca

SEQ ID NO: 1199 - DNA, 20 bp, Artificial Sequence
  Synthetic: rene_1197_HDAC11
tgtgatggtagcaacagcaa

SEQ ID NO: 1200 - DNA, 20 bp, Artificial Sequence
  Synthetic: rene_1198_HDAC11
ttgatgttcctctccacctt

SEQ ID NO: 1201 - DNA, 20 bp, Artificial Sequence
  Synthetic: rene_1199_HDAC11
ctgttgctaccatcacagaa

SEQ ID NO: 1202 - DNA, 20 bp, Artificial Sequence
  Synthetic: rene_1200_HDAC11
agcgtgtggagggcatctcc

SEQ ID NO: 1203 - DNA, 20 bp, Artificial Sequence
  Synthetic: rene_1201_HDAC11
cggcatcaaagggatgcagc

SEQ ID NO: 1204 - DNA, 20 bp, Artificial Sequence
  Synthetic: rene_1202_HDAC11
tgtttgagcgtgtggagggc

SEQ ID NO: 1205 - DNA, 20 bp, Artificial Sequence
  Synthetic: rene_1203_HDAC11
gcctggggctcattgggcct

SEQ ID NO: 1206 - DNA, 20 bp, Artificial Sequence
  Synthetic: rene_1204_HDAC11
ggaaattgatcactttgccc

SEQ ID NO: 1207 - DNA, 20 bp, Artificial Sequence
  Synthetic: rene_1205_HDAC2
tgtataagccataatttaac

SEQ ID NO: 1208 - DNA, 20 bp, Artificial Sequence
  Synthetic: rene_1206_HDAC2
caatgagagatggtatagat

SEQ ID NO: 1209 - DNA, 20 bp, Artificial Sequence
  Synthetic: rene_1207_HDAC2
aagtctggtccaaaatactc

SEQ ID NO: 1210 - DNA, 20 bp, Artificial Sequence
  Synthetic: rene_1208_HDAC2
acttaccattactgatgctt

SEQ ID NO: 1211 - DNA, 20 bp, Artificial Sequence
  Synthetic: rene_1209_HDAC2
tacggtcaataagaccagat

SEQ ID NO: 1212 - DNA, 20 bp, Artificial Sequence
  Synthetic: rene_1210_HDAC2
atatactcatcactgtgata

SEQ ID NO: 1213 - DNA, 20 bp, Artificial Sequence
  Synthetic: rene_1211_HDAC2
gaccagacttcaaactgcat

SEQ ID NO: 1214 - DNA, 20 bp, Artificial Sequence
  Synthetic: rene_1212_HDAC2
accactgttgtccttggatt

SEQ ID NO: 1215 - DNA, 20 bp, Artificial Sequence
  Synthetic: rene_1213_HDAC3
ggacagtataaccaccacca

SEQ ID NO: 1216 - DNA, 20 bp, Artificial Sequence
  Synthetic: rene_1214_HDAC3
ccccagacttcacacttcat

SEQ ID NO: 1217 - DNA, 20 bp, Artificial Sequence
  Synthetic: rene_1215_HDAC3
cttgtcattgtcatggtctc

SEQ ID NO: 1218 - DNA, 20 bp, Artificial Sequence
  Synthetic: rene_1216_HDAC3
cagccggttatcaaccaggt

SEQ ID NO: 1219 - DNA, 20 bp, Artificial Sequence
  Synthetic: rene_1217_HDAC3
tacctcactgaccgggtcat

SEQ ID NO: 1220 - DNA, 20 bp, Artificial Sequence
  Synthetic: rene_1218_HDAC3
aaagattgtctggcggatct

SEQ ID NO: 1221 - DNA, 20 bp, Artificial Sequence
  Synthetic: rene_1219_HDAC3
tacgaccccgacgtgggcaa

SEQ ID NO: 1222 - DNA, 20 bp, Artificial Sequence
  Synthetic: rene_1220_HDAC3
ccgggctctttgagttctgc

SEQ ID NO: 1223 - DNA, 20 bp, Artificial Sequence
  Synthetic: rene_1221_HDAC4
cccggcacccacctcactcc

SEQ ID NO: 1224 - DNA, 20 bp, Artificial Sequence
  Synthetic: rene_1222_HDAC4
ccagcaaggcagaaacacat

SEQ ID NO: 1225 - DNA, 20 bp, Artificial Sequence
  Synthetic: rene_1223_HDAC4
cagcaaagacccaatgcaaa

SEQ ID NO: 1226 - DNA, 20 bp, Artificial Sequence
  Synthetic: rene_1224_HDAC4
tggagaaacacaagcagcag

SEQ ID NO: 1227 - DNA, 20 bp, Artificial Sequence
  Synthetic: rene_1225_HDAC4
ctaagagggaagtcatcttt

SEQ ID NO: 1228 - DNA, 20 bp, Artificial Sequence
  Synthetic: rene_1226_HDAC4
cagcgaccctcgctactggt

SEQ ID NO: 1229 - DNA, 20 bp, Artificial Sequence
  Synthetic: rene_1227_HDAC4
gcctggaccgtaatttcaga

SEQ ID NO: 1230 - DNA, 20 bp, Artificial Sequence
  Synthetic: rene_1228_HDAC4
tccatggaacggacagcgtt

SEQ ID NO: 1231 - DNA, 20 bp, Artificial Sequence
  Synthetic: rene_1229_HDAC5
gcatgaacgtgtcgtagacc

SEQ ID NO: 1232 - DNA, 20 bp, Artificial Sequence
  Synthetic: rene_1230_HDAC5
tatccagcaccaggctcctc

SEQ ID NO: 1233 - DNA, 20 bp, Artificial Sequence
  Synthetic: rene_1231_HDAC5
gccttgaacgcactttcaag

SEQ ID NO: 1234 - DNA, 20 bp, Artificial Sequence
  Synthetic: rene_1232_HDAC5
ccatcatccggcccccagga

SEQ ID NO: 1235 - DNA, 20 bp, Artificial Sequence
  Synthetic: rene_1233_HDAC5
ctggctcagtccccaacatc

SEQ ID NO: 1236 - DNA, 20 bp, Artificial Sequence
  Synthetic: rene_1234_HDAC5
cctgggccctacgacagtcg

SEQ ID NO: 1237 - DNA, 20 bp, Artificial Sequence
  Synthetic: rene_1235_HDAC5
agaagagagctgttgagatc

SEQ ID NO: 1238 - DNA, 20 bp, Artificial Sequence
  Synthetic: rene_1236_HDAC5
cggtgatggctacagagttg

SEQ ID NO: 1239 - DNA, 20 bp, Artificial Sequence
  Synthetic: rene_1237_HDAC6
gtggcagtatgccccatacc

SEQ ID NO: 1240 - DNA, 20 bp, Artificial Sequence
  Synthetic: rene_1238_HDAC6
ggccaaggccaaggatatac

SEQ ID NO: 1241 - DNA, 20 bp, Artificial Sequence
  Synthetic: rene_1239_HDAC6
gtcatagaccagccctgtgc

SEQ ID NO: 1242 - DNA, 20 bp, Artificial Sequence
  Synthetic: rene_1240_HDAC6
cccatgcctgcttccagaac

SEQ ID NO: 1243 - DNA, 20 bp, Artificial Sequence
  Synthetic: rene_1241_HDAC6
gggaggatatgccccaccca

SEQ ID NO: 1244 - DNA, 20 bp, Artificial Sequence
  Synthetic: rene_1242_HDAC6
tctgtggcccggagatgacc

SEQ ID NO: 1245 - DNA, 20 bp, Artificial Sequence
  Synthetic: rene_1243_HDAC6
actccatctatatctgcccc

SEQ ID NO: 1246 - DNA, 20 bp, Artificial Sequence
  Synthetic: rene_1244_HDAC6
actgctcatccaacaccaag

SEQ ID NO: 1247 - DNA, 20 bp, Artificial Sequence
  Synthetic: rene_1245_HDAC7
gcagaaacatggtagccacc

SEQ ID NO: 1248 - DNA, 20 bp, Artificial Sequence
  Synthetic: rene_1246_HDAC7
gatacatgacgcagcaactg

SEQ ID NO: 1249 - DNA, 20 bp, Artificial Sequence
  Synthetic: rene_1247_HDAC7
cctcctgttcccagcctgcc

SEQ ID NO: 1250 - DNA, 20 bp, Artificial Sequence
  Synthetic: rene_1248_HDAC7
agaagaaggctggaaacaga

SEQ ID NO: 1251 - DNA, 20 bp, Artificial Sequence
  Synthetic: rene_1249_HDAC7
agaatcacctccgctagctt

SEQ ID NO: 1252 - DNA, 20 bp, Artificial Sequence
  Synthetic: rene_1250_HDAC7
ggagcagtggattcttcctc

SEQ ID NO: 1253 - DNA, 20 bp, Artificial Sequence
  Synthetic: rene_1251_HDAC7
ctgggtgccgttgccatggt

SEQ ID NO: 1254 - DNA, 20 bp, Artificial Sequence
  Synthetic: rene_1252_HDAC7
cccagtccttaatgaccacc

SEQ ID NO: 1255 - DNA, 20 bp, Artificial Sequence
  Synthetic: rene_1253_HDAC8
cctaggatgaccccggtcaa

SEQ ID NO: 1256 - DNA, 20 bp, Artificial Sequence
  Synthetic: rene_1254_HDAC8
acagcatatggtcctgatta

SEQ ID NO: 1257 - DNA, 20 bp, Artificial Sequence
  Synthetic: rene_1255_HDAC8
acctccaaagtcatgaccgt

SEQ ID NO: 1258 - DNA, 20 bp, Artificial Sequence
  Synthetic: rene_1256_HDAC8
ggattaaaggcttggtatac

SEQ ID NO: 1259 - DNA, 20 bp, Artificial Sequence
  Synthetic: rene_1257_HDAC8
atcttgtatgccatcctgaa

SEQ ID NO: 1260 - DNA, 20 bp, Artificial Sequence
  Synthetic: rene_1258_HDAC8
attgaagcatatgcactgca

SEQ ID NO: 1261 - DNA, 20 bp, Artificial Sequence
  Synthetic: rene_1259_HDAC8
gaggtgaaactgaatgcgtc

SEQ ID NO: 1262 - DNA, 20 bp, Artificial Sequence
  Synthetic: rene_1260_HDAC8
acatgactccagtgggaatt

SEQ ID NO: 1263 - DNA, 20 bp, Artificial Sequence
  Synthetic: rene_1261_HDAC9
cctggcagtggagccccaaa

SEQ ID NO: 1264 - DNA, 20 bp, Artificial Sequence
  Synthetic: rene_1262_HDAC9
tgctgaccccagcatcctgt

SEQ ID NO: 1265 - DNA, 20 bp, Artificial Sequence
  Synthetic: rene_1263_HDAC9
acagcaacgcattctaattc

SEQ ID NO: 1266 - DNA, 20 bp, Artificial Sequence
  Synthetic: rene_1264_HDAC9
gaagggggaaatcatccttt

SEQ ID NO: 1267 - DNA, 20 bp, Artificial Sequence
  Synthetic: rene_1265_HDAC9
gagggaaagccacccaacag

SEQ ID NO: 1268 - DNA, 20 bp, Artificial Sequence
  Synthetic: rene_1266_HDAC9
acctggcattagaggtaccc

SEQ ID NO: 1269 - DNA, 20 bp, Artificial Sequence
  Synthetic: rene_1267_HDAC9
acctggaccgcaccttcaag

SEQ ID NO: 1270 - DNA, 20 bp, Artificial Sequence
  Synthetic: rene_1268_HDAC9
cctcacccagcaatggaccg

SEQ ID NO: 1271 - DNA, 20 bp, Artificial Sequence
  Synthetic: rene_1269_HDGF
acggcagcctcaggcatctc

SEQ ID NO: 1272 - DNA, 20 bp, Artificial Sequence
  Synthetic: rene_1270_HDGF
gcaagcccaacaagaggaaa

SEQ ID NO: 1273 - DNA, 20 bp, Artificial Sequence
  Synthetic: rene_1271_HDGF
gtagccaggagatggccaag

SEQ ID NO: 1274 - DNA, 20 bp, Artificial Sequence
  Synthetic: rene_1272_HDGF
agccctacgtccgcctttgc

SEQ ID NO: 1275 - DNA, 20 bp, Artificial Sequence
  Synthetic: rene_1273_HDGF
tgcctcaactccttggccat

SEQ ID NO: 1276 - DNA, 20 bp, Artificial Sequence
  Synthetic: rene_1274_HDGF
tgcctccttgggacgtttag

SEQ ID NO: 1277 - DNA, 20 bp, Artificial Sequence
  Synthetic: rene_1275_HDGF
ctccttagcaaaggcggacg

SEQ ID NO: 1278 - DNA, 20 bp, Artificial Sequence
  Synthetic: rene_1276_HDGF
ctaaggaggaaacgcttgag

SEQ ID NO: 1279 - DNA, 20 bp, Artificial Sequence
  Synthetic: rene_1277_HDGFL1
ccacagccccgcgctgaagc

SEQ ID NO: 1280 - DNA, 20 bp, Artificial Sequence
  Synthetic: rene_1278_HDGFL1
ttcgggacccacgagacggc

SEQ ID NO: 1281 - DNA, 20 bp, Artificial Sequence
  Synthetic: rene_1279_HDGFL1
ggactcaggaaggccgtctc

SEQ ID NO: 1282 - DNA, 20 bp, Artificial Sequence
  Synthetic: rene_1280_HDGFL1
acttggcaaacaccaggtcc

SEQ ID NO: 1283 - DNA, 20 bp, Artificial Sequence
  Synthetic: rene_1281_HDGFL1
ccaagttaaagggctatgcc

SEQ ID NO: 1284 - DNA, 20 bp, Artificial Sequence
  Synthetic: rene_1282_HDGFL1
ggggcgtcctccggcgggtc

SEQ ID NO: 1285 - DNA, 20 bp, Artificial Sequence
  Synthetic: rene_1283_HDGFL2
gtgtgtgccaaagaaaaaga

SEQ ID NO: 1286 - DNA, 20 bp, Artificial Sequence
  Synthetic: rene_1284_HDGFL2
cgtccccccagagggcccct

SEQ ID NO: 1287 - DNA, 20 bp, Artificial Sequence
  Synthetic: rene_1285_HDGFL2
ctggcgggctctgtgcttga

SEQ ID NO: 1288 - DNA, 20 bp, Artificial Sequence
  Synthetic: rene_1286_HDGFL2
gggcaaacttgatctcactg

SEQ ID NO: 1289 - DNA, 20 bp, Artificial Sequence
  Synthetic: rene_1287_HDGFL2
ggccgaggacccgcgacttg

SEQ ID NO: 1290 - DNA, 20 bp, Artificial Sequence
  Synthetic: rene_1288_HDGFL2
gcgcaggcgtcttcctcttc

SEQ ID NO: 1291 - DNA, 20 bp, Artificial Sequence
  Synthetic: rene_1289_HDGFL2
tcgtaggggaacaggtcctt

SEQ ID NO: 1292 - DNA, 20 bp, Artificial Sequence
  Synthetic: rene_1290_HDGFL2
ttcttctctaccttcctgtc

SEQ ID NO: 1293 - DNA, 20 bp, Artificial Sequence
  Synthetic: rene_1291_HDGFL3
catataaggagtacaaagac

SEQ ID NO: 1294 - DNA, 20 bp, Artificial Sequence
  Synthetic: rene_1292_HDGFL3
atgggtgccaaaaaagaaga

SEQ ID NO: 1295 - DNA, 20 bp, Artificial Sequence
  Synthetic: rene_1293_HDGFL3
tgaagagctctgttgctgaa

SEQ ID NO: 1296 - DNA, 20 bp, Artificial Sequence
  Synthetic: rene_1294_HDGFL3
ccacaatccttcgttaaatc

SEQ ID NO: 1297 - DNA, 20 bp, Artificial Sequence
  Synthetic: rene_1295_HDGFL3
acgaaggattgtgggaaata

SEQ ID NO: 1298 - DNA, 20 bp, Artificial Sequence
  Synthetic: rene_1296_HDGFL3
gaaagtcaaacaaacggaaa

SEQ ID NO: 1299 - DNA, 20 bp, Artificial Sequence
  Synthetic: rene_1297_HDGFL3
ctggaggcttcacagcgccc

SEQ ID NO: 1300 - DNA, 20 bp, Artificial Sequence
  Synthetic: rene_1298_HDGFL3
tatttcccacaatccttcgt

SEQ ID NO: 1301 - DNA, 20 bp, Artificial Sequence
  Synthetic: rene_1299_HHLA2
accaaaccaagacttcaaag

SEQ ID NO: 1302 - DNA, 20 bp, Artificial Sequence
  Synthetic: rene_1300_HHLA2
agaggggatccgaagtcgta

SEQ ID NO: 1303 - DNA, 20 bp, Artificial Sequence
  Synthetic: rene_1301_HHLA2
tattaacagcccactgaata

SEQ ID NO: 1304 - DNA, 20 bp, Artificial Sequence
  Synthetic: rene_1302_HHLA2
cttaccatccacacagtgca

SEQ ID NO: 1305 - DNA, 20 bp, Artificial Sequence
  Synthetic: rene_1303_HHLA2
actctcatgtcaacctgtaa

SEQ ID NO: 1306 - DNA, 20 bp, Artificial Sequence
  Synthetic: rene_1304_HHLA2
agaagagtaagccttctgga

SEQ ID NO: 1307 - DNA, 20 bp, Artificial Sequence
  Synthetic: rene_1305_HHLA2
agagataggtgtgttgtcca

SEQ ID NO: 1308 - DNA, 20 bp, Artificial Sequence
  Synthetic: rene_1306_HHLA2
gaaagccaagatcccagata

SEQ ID NO: 1309 - DNA, 20 bp, Artificial Sequence
  Synthetic: rene_1307_HORMAD1
agtatcctgtatcacgtatt

SEQ ID NO: 1310 - DNA, 20 bp, Artificial Sequence
  Synthetic: rene_1308_HORMAD1
gtgatagtatagttgagtca

SEQ ID NO: 1311 - DNA, 20 bp, Artificial Sequence
  Synthetic: rene_1309_HORMAD1
gtgaaccaaaggaacatata

SEQ ID NO: 1312 - DNA, 20 bp, Artificial Sequence
  Synthetic: rene_1310_HORMAD1
aatgtgggagaagtctcaac

SEQ ID NO: 1313 - DNA, 20 bp, Artificial Sequence
  Synthetic: rene_1311_HORMAD1
atggtcaaacaaacatcatt

SEQ ID NO: 1314 - DNA, 20 bp, Artificial Sequence
  Synthetic: rene_1312_HORMAD1
tgtaaagcatcataacatcc

SEQ ID NO: 1315 - DNA, 20 bp, Artificial Sequence
  Synthetic: rene_1313_HORMAD1
aatacataggttccccttca

SEQ ID NO: 1316 - DNA, 20 bp, Artificial Sequence
  Synthetic: rene_1314_HORMAD1
gcactgactcttgactagaa

SEQ ID NO: 1317 - DNA, 20 bp, Artificial Sequence
  Synthetic: rene_1315_ICOS
gctgtgttcactgctctcat

SEQ ID NO: 1318 - DNA, 20 bp, Artificial Sequence
  Synthetic: rene_1316_ICOS
aagtaactcttacaggagga

SEQ ID NO: 1319 - DNA, 20 bp, Artificial Sequence
  Synthetic: rene_1317_ICOS
aaaggaggaggatcaaaaat

SEQ ID NO: 1320 - DNA, 20 bp, Artificial Sequence
  Synthetic: rene_1318_ICOS
tatacaacttggaccattct

SEQ ID NO: 1321 - DNA, 20 bp, Artificial Sequence
  Synthetic: rene_1319_ICOS
acaacggaggtgtacaaatt

SEQ ID NO: 1322 - DNA, 20 bp, Artificial Sequence
  Synthetic: rene_1320_ICOS
atgcgcaagcagaagagaaa

SEQ ID NO: 1323 - DNA, 20 bp, Artificial Sequence
  Synthetic: rene_1321_ICOS
taagccaacaaataagtatg

SEQ ID NO: 1324 - DNA, 20 bp, Artificial Sequence
  Synthetic: rene_1322_ICOS
aattgctggacaatgtcagg

SEQ ID NO: 1325 - DNA, 20 bp, Artificial Sequence
  Synthetic: rene_1323_ICOSLG
gactcactggtttgccaata

SEQ ID NO: 1326 - DNA, 20 bp, Artificial Sequence
  Synthetic: rene_1324_ICOSLG
ccaatatacgtaaacatcat

SEQ ID NO: 1327 - DNA, 20 bp, Artificial Sequence
  Synthetic: rene_1325_ICOSLG
caaggagctgttctgtggga

SEQ ID NO: 1328 - DNA, 20 bp, Artificial Sequence
  Synthetic: rene_1326_ICOSLG
actgcctggtgttgagccaa

SEQ ID NO: 1329 - DNA, 20 bp, Artificial Sequence
  Synthetic: rene_1327_ICOSLG
agcgttgaggttacactgca

SEQ ID NO: 1330 - DNA, 20 bp, Artificial Sequence
  Synthetic: rene_1328_ICOSLG
cgtatattggcaaaccagtg

SEQ ID NO: 1331 - DNA, 20 bp, Artificial Sequence
  Synthetic: rene_1329_ICOSLG
tcgccggtactgactggatt

SEQ ID NO: 1332 - DNA, 20 bp, Artificial Sequence
  Synthetic: rene_1330_ICOSLG
tggatgtacacgtgaaggtg

SEQ ID NO: 1333 - DNA, 20 bp, Artificial Sequence
  Synthetic: rene_1331_IFNL1
aacctgccaatgtggcagcc

SEQ ID NO: 1334 - DNA, 20 bp, Artificial Sequence
  Synthetic: rene_1332_IFNL1
gtgctaggcttggccgtggc

SEQ ID NO: 1335 - DNA, 20 bp, Artificial Sequence
  Synthetic: rene_1333_IFNL1
ggggcctcctggagccggtg

SEQ ID NO: 1336 - DNA, 20 bp, Artificial Sequence
  Synthetic: rene_1334_IFNL1
aggtctcgcgtgaggaggcg

SEQ ID NO: 1337 - DNA, 20 bp, Artificial Sequence
  Synthetic: rene_1335_IL12B
ccagagcctaagacctcact

SEQ ID NO: 1338 - DNA, 20 bp, Artificial Sequence
  Synthetic: rene_1336_IL12B
tccaggggcatccggatacc

SEQ ID NO: 1339 - DNA, 20 bp, Artificial Sequence
  Synthetic: rene_1337_IL12B
gagatgctggccagtacacc

SEQ ID NO: 1340 - DNA, 20 bp, Artificial Sequence
  Synthetic: rene_1338_IL12B
acactgaatgtcaaatcagt

SEQ ID NO: 1341 - DNA, 20 bp, Artificial Sequence
  Synthetic: rene_1339_IL12B
acctgctggtggctgacgac

SEQ ID NO: 1342 - DNA, 20 bp, Artificial Sequence
  Synthetic: rene_1340_IL12B
tgtcgtagaattggattggt

SEQ ID NO: 1343 - DNA, 20 bp, Artificial Sequence
  Synthetic: rene_1341_IL12B
tggcatctcccctcgtggcc

SEQ ID NO: 1344 - DNA, 20 bp, Artificial Sequence
  Synthetic: rene_1342_IL12B
atacttgagcttgtgaacgg

SEQ ID NO: 1345 - DNA, 20 bp, Artificial Sequence
  Synthetic: rene_1343_IL12RB1
ctgccccattgccccagact

SEQ ID NO: 1346 - DNA, 20 bp, Artificial Sequence
  Synthetic: rene_1344_IL12RB1
aggacccgccatatccggat

SEQ ID NO: 1347 - DNA, 20 bp, Artificial Sequence
  Synthetic: rene_1345_IL12RB1
gtcctggcctgaaccagacg

SEQ ID NO: 1348 - DNA, 20 bp, Artificial Sequence
  Synthetic: rene_1346_IL12RB1
ggacgccgggacaggtgctc

SEQ ID NO: 1349 - DNA, 20 bp, Artificial Sequence
  Synthetic: rene_1347_IL12RB1
agggtcagccgcctcctccc

SEQ ID NO: 1350 - DNA, 20 bp, Artificial Sequence
  Synthetic: rene_1348_IL12RB1
tcccaggacatctctaccac

SEQ ID NO: 1351 - DNA, 20 bp, Artificial Sequence
  Synthetic: rene_1349_IL12RB1
cctctgcgcaccccgagaag

SEQ ID NO: 1352 - DNA, 20 bp, Artificial Sequence
  Synthetic: rene_1350_IL12RB1
tgattggctcatcttcttcg

SEQ ID NO: 1353 - DNA, 20 bp, Artificial Sequence
  Synthetic: rene_1351_IL23A
acaggggagccttctctgct

SEQ ID NO: 1354 - DNA, 20 bp, Artificial Sequence
  Synthetic: rene_1352_IL23A
tgagaagctgctaggatcgg

SEQ ID NO: 1355 - DNA, 20 bp, Artificial Sequence
  Synthetic: rene_1353_IL23A
acagaagctctgcacactgg

SEQ ID NO: 1356 - DNA, 20 bp, Artificial Sequence
  Synthetic: rene_1354_IL23A
cccatggagcagcaaccctg

SEQ ID NO: 1357 - DNA, 20 bp, Artificial Sequence
  Synthetic: rene_1355_IL23A
tagtctcttcatctccctct

SEQ ID NO: 1358 - DNA, 20 bp, Artificial Sequence
  Synthetic: rene_1356_IL23A
aagcggagaaggagacgctg

SEQ ID NO: 1359 - DNA, 20 bp, Artificial Sequence
  Synthetic: rene_1357_IL23A
tggctgtagccgcccgggtc

SEQ ID NO: 1360 - DNA, 20 bp, Artificial Sequence
  Synthetic: rene_1358_IL23R
gagacagaagaagagcaaca

SEQ ID NO: 1361 - DNA, 20 bp, Artificial Sequence
  Synthetic: rene_1359_IL23R
catatgtgcaacagtcagaa

SEQ ID NO: 1362 - DNA, 20 bp, Artificial Sequence
  Synthetic: rene_1360_IL23R
aagagacactgatatgtgga

SEQ ID NO: 1363 - DNA, 20 bp, Artificial Sequence
  Synthetic: rene_1361_IL23R
agatgggtatgaatatctct

SEQ ID NO: 1364 - DNA, 20 bp, Artificial Sequence
  Synthetic: rene_1362_IL23R
ggtccaagcagcaaacgcac

SEQ ID NO: 1365 - DNA, 20 bp, Artificial Sequence
  Synthetic: rene_1363_IL23R
gctccaagtagaattctgac

SEQ ID NO: 1366 - DNA, 20 bp, Artificial Sequence
  Synthetic: rene_1364_IL23R
atattaggaatatcttcata

SEQ ID NO: 1367 - DNA, 20 bp, Artificial Sequence
  Synthetic: rene_1365_IL23R
aagtgagatgtcaagaaaca

SEQ ID NO: 1368 - DNA, 20 bp, Artificial Sequence
  Synthetic: rene_1366_IL6ST
ccttccaccatcccactcac

SEQ ID NO: 1369 - DNA, 20 bp, Artificial Sequence
  Synthetic: rene_1367_IL6ST
gtattataacactcttaata

SEQ ID NO: 1370 - DNA, 20 bp, Artificial Sequence
  Synthetic: rene_1368_IL6ST
actgatgtaagtgttgtgga

SEQ ID NO: 1371 - DNA, 20 bp, Artificial Sequence
  Synthetic: rene_1369_IL6ST
ggtggaatggactactccaa

SEQ ID NO: 1372 - DNA, 20 bp, Artificial Sequence
  Synthetic: rene_1370_IL6ST
actatccctgcctgtgactt

SEQ ID NO: 1373 - DNA, 20 bp, Artificial Sequence
  Synthetic: rene_1371_IL6ST
agtctaacaaaatcttcctc

SEQ ID NO: 1374 - DNA, 20 bp, Artificial Sequence
  Synthetic: rene_1372_IL6ST
cccaggcaacagtacttcaa

SEQ ID NO: 1375 - DNA, 20 bp, Artificial Sequence
  Synthetic: rene_1373_IL6ST
ctattcctaaggagcaatat

SEQ ID NO: 1376 - DNA, 20 bp, Artificial Sequence
  Synthetic: rene_1374_ING1
gagggcggaggccaggagga

SEQ ID NO: 1377 - DNA, 20 bp, Artificial Sequence
  Synthetic: rene_1375_ING1
tgattgagccccacgcacga

SEQ ID NO: 1378 - DNA, 20 bp, Artificial Sequence
  Synthetic: rene_1376_ING1
aggccgcatctctgctgacc

SEQ ID NO: 1379 - DNA, 20 bp, Artificial Sequence
  Synthetic: rene_1377_ING1
tctgcaagtcgaaaggcagg

SEQ ID NO: 1380 - DNA, 20 bp, Artificial Sequence
  Synthetic: rene_1378_ING1
tccagggctttgtccatggt

SEQ ID NO: 1381 - DNA, 20 bp, Artificial Sequence
  Synthetic: rene_1379_ING1
gatttctccagggctttgtc

SEQ ID NO: 1382 - DNA, 20 bp, Artificial Sequence
  Synthetic: rene_1380_ING1
gacttgcagagaaatgtctc

SEQ ID NO: 1383 - DNA, 20 bp, Artificial Sequence
  Synthetic: rene_1381_ING1
ggggaggagcggggtggagg

SEQ ID NO: 1384 - DNA, 20 bp, Artificial Sequence
  Synthetic: rene_1382_ING2
taggtaagtgaaacacatga

SEQ ID NO: 1385 - DNA, 20 bp, Artificial Sequence
  Synthetic: rene_1383_ING2
gtagacatcatcaatttcct

SEQ ID NO: 1386 - DNA, 20 bp, Artificial Sequence
  Synthetic: rene_1384_ING2
ggtggctgatcatcacagtc

SEQ ID NO: 1387 - DNA, 20 bp, Artificial Sequence
  Synthetic: rene_1385_ING2
acttacctataaaccaaagg

SEQ ID NO: 1388 - DNA, 20 bp, Artificial Sequence
  Synthetic: rene_1386_ING2
atgtgtttcacttacctata

SEQ ID NO: 1389 - DNA, 20 bp, Artificial Sequence
  Synthetic: rene_1387_ING2
caatagatcctaatgaacct

SEQ ID NO: 1390 - DNA, 20 bp, Artificial Sequence
  Synthetic: rene_1388_ING2
atctcccaattcttgactat

SEQ ID NO: 1391 - DNA, 20 bp, Artificial Sequence
  Synthetic: rene_1389_ING2
tcattatctcccctgcactt

SEQ ID NO: 1392 - DNA, 20 bp, Artificial Sequence
  Synthetic: rene_1390_ING3
aaatggagctggaagctgat

SEQ ID NO: 1393 - DNA, 20 bp, Artificial Sequence
  Synthetic: rene_1391_ING3
cctggccattgaaaattctt

SEQ ID NO: 1394 - DNA, 20 bp, Artificial Sequence
  Synthetic: rene_1392_ING3
aacttagccagttcctgatc

SEQ ID NO: 1395 - DNA, 20 bp, Artificial Sequence
  Synthetic: rene_1393_ING3
cttagaggcatctgacgtaa

SEQ ID NO: 1396 - DNA, 20 bp, Artificial Sequence
  Synthetic: rene_1394_ING3
aatctgaagctcttctatcc

SEQ ID NO: 1397 - DNA, 20 bp, Artificial Sequence
  Synthetic: rene_1395_ING3
cgtgaagcggtcccgcagat

SEQ ID NO: 1398 - DNA, 20 bp, Artificial Sequence
  Synthetic: rene_1396_ING3
ggtcgtaagtccaatcaacc

SEQ ID NO: 1399 - DNA, 20 bp, Artificial Sequence
  Synthetic: rene_1397_ING3
gaagatgcagatgagaaggt

SEQ ID NO: 1400 - DNA, 20 bp, Artificial Sequence
  Synthetic: rene_1398_ING4
cctgtgtggggctgacaacc

SEQ ID NO: 1401 - DNA, 20 bp, Artificial Sequence
  Synthetic: rene_1399_ING4
cctttgctggaagagctgtc

SEQ ID NO: 1402 - DNA, 20 bp, Artificial Sequence
  Synthetic: rene_1400_ING4
cccacgctgctcccaagaac

SEQ ID NO: 1403 - DNA, 20 bp, Artificial Sequence
  Synthetic: rene_1401_ING4
cctttggaacgagcacgagc

SEQ ID NO: 1404 - DNA, 20 bp, Artificial Sequence
  Synthetic: rene_1402_ING4
gtgacgacaaggtgcagctt

SEQ ID NO: 1405 - DNA, 20 bp, Artificial Sequence
  Synthetic: rene_1403_ING4
gtctaggtccctcatgagct

SEQ ID NO: 1406 - DNA, 20 bp, Artificial Sequence
  Synthetic: rene_1404_ING4
gaacgagcacgagcagcttt

SEQ ID NO: 1407 - DNA, 20 bp, Artificial Sequence
  Synthetic: rene_1405_ING4
ctggaagagctgtcatagtc

SEQ ID NO: 1408 - DNA, 20 bp, Artificial Sequence
  Synthetic: rene_1406_ING5
gtggtaaggtccacgcaggc

SEQ ID NO: 1409 - DNA, 20 bp, Artificial Sequence
  Synthetic: rene_1407_ING5
gtgtgtcttcctctgatgtc

SEQ ID NO: 1410 - DNA, 20 bp, Artificial Sequence
  Synthetic: rene_1408_ING5
ggtccacgggcatgtccagc

SEQ ID NO: 1411 - DNA, 20 bp, Artificial Sequence
  Synthetic: rene_1409_ING5
accctcgccctccggagctt

SEQ ID NO: 1412 - DNA, 20 bp, Artificial Sequence
  Synthetic: rene_1410_ING5
actttgcctgcgtggacctt

SEQ ID NO: 1413 - DNA, 20 bp, Artificial Sequence
  Synthetic: rene_1411_ING5
cctgcgtggaccttaccacg

SEQ ID NO: 1414 - DNA, 20 bp, Artificial Sequence
  Synthetic: rene_1412_ING5
tgcgtgaaagtgggactcct

SEQ ID NO: 1415 - DNA, 20 bp, Artificial Sequence
  Synthetic: rene_1413_ING5
aaaatcactgccctccatct

SEQ ID NO: 1416 - DNA, 20 bp, Artificial Sequence
  Synthetic: rene_1414_INTS12
gctgcaaaagctgcccatcc

SEQ ID NO: 1417 - DNA, 20 bp, Artificial Sequence
  Synthetic: rene_1415_INTS12
cctatggctgacctttccag

SEQ ID NO: 1418 - DNA, 20 bp, Artificial Sequence
  Synthetic: rene_1416_INTS12
aggagaccagtgctgatgat

SEQ ID NO: 1419 - DNA, 20 bp, Artificial Sequence
  Synthetic: rene_1417_INTS12
actggtctggcaacatcatc

SEQ ID NO: 1420 - DNA, 20 bp, Artificial Sequence
  Synthetic: rene_1418_INTS12
cattaagcaagagcccaaaa

SEQ ID NO: 1421 - DNA, 20 bp, Artificial Sequence
  Synthetic: rene_1419_INTS12
tggttagctgacgaagtagc

SEQ ID NO: 1422 - DNA, 20 bp, Artificial Sequence
  Synthetic: rene_1420_INTS12
ctggtagtacttccactagg

SEQ ID NO: 1423 - DNA, 20 bp, Artificial Sequence
  Synthetic: rene_1421_INTS12
aaaccacctccacctctaac

SEQ ID NO: 1424 - DNA, 20 bp, Artificial Sequence
  Synthetic: rene_1422_IRF8
agagaaaaccaacagatcac

SEQ ID NO: 1425 - DNA, 20 bp, Artificial Sequence
  Synthetic: rene_1423_IRF8
agagcgaccgcactccatct

SEQ ID NO: 1426 - DNA, 20 bp, Artificial Sequence
  Synthetic: rene_1424_IRF8
ggagaatgaggagaagagca

SEQ ID NO: 1427 - DNA, 20 bp, Artificial Sequence
  Synthetic: rene_1425_IRF8
caagggatccggaacatgct

SEQ ID NO: 1428 - DNA, 20 bp, Artificial Sequence
  Synthetic: rene_1426_IRF8
atcatccccatgtaatcgtc

SEQ ID NO: 1429 - DNA, 20 bp, Artificial Sequence
  Synthetic: rene_1427_IRF8
cgagccatacaaagtttacc

SEQ ID NO: 1430 - DNA, 20 bp, Artificial Sequence
  Synthetic: rene_1428_IRF8
aagaaggggacaaagctgaa

SEQ ID NO: 1431 - DNA, 20 bp, Artificial Sequence
  Synthetic: rene_1429_IRF8
aagggaagtttaaagaaggg

SEQ ID NO: 1432 - DNA, 20 bp, Artificial Sequence
  Synthetic: rene_1430_ITGAV
ctgggaagtactcctttgcc

SEQ ID NO: 1433 - DNA, 20 bp, Artificial Sequence
  Synthetic: rene_1431_ITGAV
agtgtgcaccagcagtcaga

SEQ ID NO: 1434 - DNA, 20 bp, Artificial Sequence
  Synthetic: rene_1432_ITGAV
gagacaaactcactccaatt

SEQ ID NO: 1435 - DNA, 20 bp, Artificial Sequence
  Synthetic: rene_1433_ITGAV
gtgtagatcgagctatctta

SEQ ID NO: 1436 - DNA, 20 bp, Artificial Sequence
  Synthetic: rene_1434_ITGAV
tctacagcaggtccccaagt

SEQ ID NO: 1437 - DNA, 20 bp, Artificial Sequence
  Synthetic: rene_1435_ITGAV
ccatcagagccacgatccat

SEQ ID NO: 1438 - DNA, 20 bp, Artificial Sequence
  Synthetic: rene_1436_ITGAV
tcttcacccccatatggagc

SEQ ID NO: 1439 - DNA, 20 bp, Artificial Sequence
  Synthetic: rene_1437_ITGAV
acagaagtatccatctctga

SEQ ID NO: 1440 - DNA, 20 bp, Artificial Sequence
  Synthetic: rene_1438_ITM2A
gaggcataacaatagaagta

SEQ ID NO: 1441 - DNA, 20 bp, Artificial Sequence
  Synthetic: rene_1439_ITM2A
tctgatagtgaccctgcagc

SEQ ID NO: 1442 - DNA, 20 bp, Artificial Sequence
  Synthetic: rene_1440_ITM2A
caggatcctcagaatcaaaa

SEQ ID NO: 1443 - DNA, 20 bp, Artificial Sequence
  Synthetic: rene_1441_ITM2A
ctccacagcaactaggtctt

SEQ ID NO: 1444 - DNA, 20 bp, Artificial Sequence
  Synthetic: rene_1442_ITM2A
ccgtggagagatgtgctttt

SEQ ID NO: 1445 - DNA, 20 bp, Artificial Sequence
  Synthetic: rene_1443_ITM2A
ccaaagagctctaccagatt

SEQ ID NO: 1446 - DNA, 20 bp, Artificial Sequence
  Synthetic: rene_1444_ITM2A
attctgaggatcctgcaaat

SEQ ID NO: 1447 - DNA, 20 bp, Artificial Sequence
  Synthetic: rene_1445_ITM2A
aacaaacgtgccattgataa

SEQ ID NO: 1448 - DNA, 20 bp, Artificial Sequence
  Synthetic: rene_1446_ITPR2
ctgtccccaatatatgtgaa

SEQ ID NO: 1449 - DNA, 20 bp, Artificial Sequence
  Synthetic: rene_1447_ITPR2
gctgttgctctcttctaccc

SEQ ID NO: 1450 - DNA, 20 bp, Artificial Sequence
  Synthetic: rene_1448_ITPR2
gcttagtgataaccacatcc

SEQ ID NO: 1451 - DNA, 20 bp, Artificial Sequence
  Synthetic: rene_1449_ITPR2
gcagaagatactatcacagc

SEQ ID NO: 1452 - DNA, 20 bp, Artificial Sequence
  Synthetic: rene_1450_ITPR2
gtgttcactataacatcgat

SEQ ID NO: 1453 - DNA, 20 bp, Artificial Sequence
  Synthetic: rene_1451_ITPR2
gctggagcaccaggtccatt

SEQ ID NO: 1454 - DNA, 20 bp, Artificial Sequence
  Synthetic: rene_1452_ITPR2
agtccagtgcaggatggaac

SEQ ID NO: 1455 - DNA, 20 bp, Artificial Sequence
  Synthetic: rene_1453_ITPR2
accaggactatgaagtacaa

SEQ ID NO: 1456 - DNA, 20 bp, Artificial Sequence
  Synthetic: rene_1454_JADE1
gctgaacccccagggcacat

SEQ ID NO: 1457 - DNA, 20 bp, Artificial Sequence
  Synthetic: rene_1455_JADE1
ggacagacctgatcactgcc

SEQ ID NO: 1458 - DNA, 20 bp, Artificial Sequence
  Synthetic: rene_1456_JADE1
ctgtaccagtactggaagtt

SEQ ID NO: 1459 - DNA, 20 bp, Artificial Sequence
  Synthetic: rene_1457_JADE1
ggtttagaaaagacctttgc

SEQ ID NO: 1460 - DNA, 20 bp, Artificial Sequence
  Synthetic: rene_1458_JADE1
cctgcgggtcaccatgtaag

SEQ ID NO: 1461 - DNA, 20 bp, Artificial Sequence
  Synthetic: rene_1459_JADE1
actgggctggcaggtgttgt

SEQ ID NO: 1462 - DNA, 20 bp, Artificial Sequence
  Synthetic: rene_1460_JADE1
tgaagaatgcagaatgccac

SEQ ID NO: 1463 - DNA, 20 bp, Artificial Sequence
  Synthetic: rene_1461_JADE1
ccatggtctggcatcaccac

SEQ ID NO: 1464 - DNA, 20 bp, Artificial Sequence
  Synthetic: rene_1462_JADE2
gctggacacccagggcacac

SEQ ID NO: 1465 - DNA, 20 bp, Artificial Sequence
  Synthetic: rene_1463_JADE2
acactgagactgatggctac

SEQ ID NO: 1466 - DNA, 20 bp, Artificial Sequence
  Synthetic: rene_1464_JADE2
cggacagacttgatcacagc

SEQ ID NO: 1467 - DNA, 20 bp, Artificial Sequence
  Synthetic: rene_1465_JADE2
atctgcaggtggaatatctg

SEQ ID NO: 1468 - DNA, 20 bp, Artificial Sequence
  Synthetic: rene_1466_JADE2
gagcatcttgatgcggatgt

SEQ ID NO: 1469 - DNA, 20 bp, Artificial Sequence
  Synthetic: rene_1467_JADE2
tctggagtcgtccgtgaacc

SEQ ID NO: 1470 - DNA, 20 bp, Artificial Sequence
  Synthetic: rene_1468_JADE2
ctcttcagcttccagtactg

SEQ ID NO: 1471 - DNA, 20 bp, Artificial Sequence
  Synthetic: rene_1469_JADE2
gttctctcgcgccttgtcac

SEQ ID NO: 1472 - DNA, 20 bp, Artificial Sequence
  Synthetic: rene_1470_JADE3
cccaccaccaagaattacct

SEQ ID NO: 1473 - DNA, 20 bp, Artificial Sequence
  Synthetic: rene_1471_JADE3
ggtgacattcccagaccagc

SEQ ID NO: 1474 - DNA, 20 bp, Artificial Sequence
  Synthetic: rene_1472_JADE3
cctgtctgagctatctttcc

SEQ ID NO: 1475 - DNA, 20 bp, Artificial Sequence
  Synthetic: rene_1473_JADE3
aaggacctactaaagtgttc

SEQ ID NO: 1476 - DNA, 20 bp, Artificial Sequence
  Synthetic: rene_1474_JADE3
gtctgaactgtcactgctgc

SEQ ID NO: 1477 - DNA, 20 bp, Artificial Sequence
  Synthetic: rene_1475_JADE3
gtaggtcctttaaagagacc

SEQ ID NO: 1478 - DNA, 20 bp, Artificial Sequence
  Synthetic: rene_1476_JADE3
acttgatcctatacattgag

SEQ ID NO: 1479 - DNA, 20 bp, Artificial Sequence
  Synthetic: rene_1477_JADE3
ccattcccaatggaagactg

SEQ ID NO: 1480 - DNA, 20 bp, Artificial Sequence
  Synthetic: rene_1478_JAK3
gtggcgtcaccatgcccatc

SEQ ID NO: 1481 - DNA, 20 bp, Artificial Sequence
  Synthetic: rene_1479_JAK3
gcagatacatgtctatggcc

SEQ ID NO: 1482 - DNA, 20 bp, Artificial Sequence
  Synthetic: rene_1480_JAK3
acggccaccagggcacctgt

SEQ ID NO: 1483 - DNA, 20 bp, Artificial Sequence
  Synthetic: rene_1481_JAK3
acaagatccctgctgacagc

SEQ ID NO: 1484 - DNA, 20 bp, Artificial Sequence
  Synthetic: rene_1482_JAK3
gccagtgctatccttgacct

SEQ ID NO: 1485 - DNA, 20 bp, Artificial Sequence
  Synthetic: rene_1483_JAK3
tgaggaccggcagcagctgc

SEQ ID NO: 1486 - DNA, 20 bp, Artificial Sequence
  Synthetic: rene_1484_JAK3
gggcctccccatccaccacc

SEQ ID NO: 1487 - DNA, 20 bp, Artificial Sequence
  Synthetic: rene_1485_JAK3
ggctggagaagtgccaccgc

SEQ ID NO: 1488 - DNA, 20 bp, Artificial Sequence
  Synthetic: rene_1486_JARID2
cctgagattgtgtggttgac

SEQ ID NO: 1489 - DNA, 20 bp, Artificial Sequence
  Synthetic: rene_1487_JARID2
agacacgctgtacccacagc

SEQ ID NO: 1490 - DNA, 20 bp, Artificial Sequence
  Synthetic: rene_1488_JARID2
gagaggtctgatatctgagt

SEQ ID NO: 1491 - DNA, 20 bp, Artificial Sequence
  Synthetic: rene_1489_JARID2
ggttcaacctgccactgacc

SEQ ID NO: 1492 - DNA, 20 bp, Artificial Sequence
  Synthetic: rene_1490_JARID2
acaggaggcgctgtccgcct

SEQ ID NO: 1493 - DNA, 20 bp, Artificial Sequence
  Synthetic: rene_1491_JARID2
ctgagacagttctcaatgct

SEQ ID NO: 1494 - DNA, 20 bp, Artificial Sequence
  Synthetic: rene_1492_JARID2
ctaccacccagtggacaagt

SEQ ID NO: 1495 - DNA, 20 bp, Artificial Sequence
  Synthetic: rene_1493_JARID2
aatggttccagcaggtcaac

SEQ ID NO: 1496 - DNA, 20 bp, Artificial Sequence
  Synthetic: rene_1494_JMJD1C
gcagacccagtgaatgttaa

SEQ ID NO: 1497 - DNA, 20 bp, Artificial Sequence
  Synthetic: rene_1495_JMJD1C
gttgtaaagggagcaacatc

SEQ ID NO: 1498 - DNA, 20 bp, Artificial Sequence
  Synthetic: rene_1496_JMJD1C
gtaggcaagataccagaaca

SEQ ID NO: 1499 - DNA, 20 bp, Artificial Sequence
  Synthetic: rene_1497_JMJD1C
tatccagaccacccacacca

SEQ ID NO: 1500 - DNA, 20 bp, Artificial Sequence
  Synthetic: rene_1498_JMJD1C
atgtgtccacaaactcatag

SEQ ID NO: 1501 - DNA, 20 bp, Artificial Sequence
  Synthetic: rene_1499_JMJD1C
tgtgccccagctgaagatct

SEQ ID NO: 1502 - DNA, 20 bp, Artificial Sequence
  Synthetic: rene_1500_JMJD1C
gagaccaccaagctgatctc

SEQ ID NO: 1503 - DNA, 20 bp, Artificial Sequence
  Synthetic: rene_1501_JMJD1C
gtgtgggtggtctggataca

SEQ ID NO: 1504 - DNA, 20 bp, Artificial Sequence
  Synthetic: rene_1502_KAT2A
gtagcgggggaggctatcac

SEQ ID NO: 1505 - DNA, 20 bp, Artificial Sequence
  Synthetic: rene_1503_KAT2A
ccccatagatctcctcctcc

SEQ ID NO: 1506 - DNA, 20 bp, Artificial Sequence
  Synthetic: rene_1504_KAT2A
tctcatcctctgacacattc

SEQ ID NO: 1507 - DNA, 20 bp, Artificial Sequence
  Synthetic: rene_1505_KAT2A
ggcagaggtctcaggctgag

SEQ ID NO: 1508 - DNA, 20 bp, Artificial Sequence
  Synthetic: rene_1506_KAT2A
ccaccagctgccgcgcatgc

SEQ ID NO: 1509 - DNA, 20 bp, Artificial Sequence
  Synthetic: rene_1507_KAT2A
tccttctccactcggaactt

SEQ ID NO: 1510 - DNA, 20 bp, Artificial Sequence
  Synthetic: rene_1508_KAT2A
accgttacccgccggcagct

SEQ ID NO: 1511 - DNA, 20 bp, Artificial Sequence
  Synthetic: rene_1509_KAT2A
cagccattacacttacaggt

SEQ ID NO: 1512 - DNA, 20 bp, Artificial Sequence
  Synthetic: rene_1510_KAT2B
gtaccgaggtagactgtcgc

SEQ ID NO: 1513 - DNA, 20 bp, Artificial Sequence
  Synthetic: rene_1511_KAT2B
cctgtgtccacaaggaagaa

SEQ ID NO: 1514 - DNA, 20 bp, Artificial Sequence
  Synthetic: rene_1512_KAT2B
cctcaagtccagaagaggct

SEQ ID NO: 1515 - DNA, 20 bp, Artificial Sequence
  Synthetic: rene_1513_KAT2B
tctcagcctcttccagaacc

SEQ ID NO: 1516 - DNA, 20 bp, Artificial Sequence
  Synthetic: rene_1514_KAT2B
gtcacctgccagcaaaagaa

SEQ ID NO: 1517 - DNA, 20 bp, Artificial Sequence
  Synthetic: rene_1515_KAT2B
tgtccatgctagaagaagaa

SEQ ID NO: 1518 - DNA, 20 bp, Artificial Sequence
  Synthetic: rene_1516_KAT2B
aggttacagcacagaagaca

SEQ ID NO: 1519 - DNA, 20 bp, Artificial Sequence
  Synthetic: rene_1517_KAT2B
tggatacaaagagaactaca

SEQ ID NO: 1520 - DNA, 20 bp, Artificial Sequence
  Synthetic: rene_1518_KAT5
ccttccactttggagagttc

SEQ ID NO: 1521 - DNA, 20 bp, Artificial Sequence
  Synthetic: rene_1519_KAT5
cttgaccataagacactgta

SEQ ID NO: 1522 - DNA, 20 bp, Artificial Sequence
  Synthetic: rene_1520_KAT5
ccgcaagggcaccatctcct

SEQ ID NO: 1523 - DNA, 20 bp, Artificial Sequence
  Synthetic: rene_1521_KAT5
ggtccagccgctcatgcgtc

SEQ ID NO: 1524 - DNA, 20 bp, Artificial Sequence
  Synthetic: rene_1522_KAT5
accagcaactccagtgccca

SEQ ID NO: 1525 - DNA, 20 bp, Artificial Sequence
  Synthetic: rene_1523_KAT5
gccaagtgtttccttgacca

SEQ ID NO: 1526 - DNA, 20 bp, Artificial Sequence
  Synthetic: rene_1524_KAT5
gcttccgtcctggctgggct

SEQ ID NO: 1527 - DNA, 20 bp, Artificial Sequence
  Synthetic: rene_1525_KAT5
agattgatggacgtaagaac

SEQ ID NO: 1528 - DNA, 20 bp, Artificial Sequence
  Synthetic: rene_1526_KAT6A
accccagctcctatgatcat

SEQ ID NO: 1529 - DNA, 20 bp, Artificial Sequence
  Synthetic: rene_1527_KAT6A
gtgataaaggcactccaata

SEQ ID NO: 1530 - DNA, 20 bp, Artificial Sequence
  Synthetic: rene_1528_KAT6A
tctggagaccctgcttggcc

SEQ ID NO: 1531 - DNA, 20 bp, Artificial Sequence
  Synthetic: rene_1529_KAT6A
gatgctaatatgcagaagag

SEQ ID NO: 1532 - DNA, 20 bp, Artificial Sequence
  Synthetic: rene_1530_KAT6A
ccctgaactaacggttcgag

SEQ ID NO: 1533 - DNA, 20 bp, Artificial Sequence
  Synthetic: rene_1531_KAT6A
gtgatatccaagaacaagca

SEQ ID NO: 1534 - DNA, 20 bp, Artificial Sequence
  Synthetic: rene_1532_KAT6A
gaggccatcaaaaaagtgaa

SEQ ID NO: 1535 - DNA, 20 bp, Artificial Sequence
  Synthetic: rene_1533_KAT6A
cctagagaatacttccgtcg

SEQ ID NO: 1536 - DNA, 20 bp, Artificial Sequence
  Synthetic: rene_1534_KAT6B
cttgacctcctcctcaatcc

SEQ ID NO: 1537 - DNA, 20 bp, Artificial Sequence
  Synthetic: rene_1535_KAT6B
agagacgacagaagtactga

SEQ ID NO: 1538 - DNA, 20 bp, Artificial Sequence
  Synthetic: rene_1536_KAT6B
cctgtgtgaattctgtctta

SEQ ID NO: 1539 - DNA, 20 bp, Artificial Sequence
  Synthetic: rene_1537_KAT6B
gtccccaaacagaagctaca

SEQ ID NO: 1540 - DNA, 20 bp, Artificial Sequence
  Synthetic: rene_1538_KAT6B
gctgtgagagatgccaatat

SEQ ID NO: 1541 - DNA, 20 bp, Artificial Sequence
  Synthetic: rene_1539_KAT6B
tgtggtacctgtagccaaca

SEQ ID NO: 1542 - DNA, 20 bp, Artificial Sequence
  Synthetic: rene_1540_KAT6B
cttggacgatagtgctttga

SEQ ID NO: 1543 - DNA, 20 bp, Artificial Sequence
  Synthetic: rene_1541_KAT6B
ccaagtctgcagaccaaaga

SEQ ID NO: 1544 - DNA, 20 bp, Artificial Sequence
  Synthetic: rene_1542_KAT7
tggaccacaagacattatat

SEQ ID NO: 1545 - DNA, 20 bp, Artificial Sequence
  Synthetic: rene_1543_KAT7
cttatatcgaagctgtctct

SEQ ID NO: 1546 - DNA, 20 bp, Artificial Sequence
  Synthetic: rene_1544_KAT7
ttgccatccacttcaaacac

SEQ ID NO: 1547 - DNA, 20 bp, Artificial Sequence
  Synthetic: rene_1545_KAT7
aaatatatgaagagccaaac

SEQ ID NO: 1548 - DNA, 20 bp, Artificial Sequence
  Synthetic: rene_1546_KAT7
aacagaattcacacatatag

SEQ ID NO: 1549 - DNA, 20 bp, Artificial Sequence
  Synthetic: rene_1547_KAT7
ccttccagtatttgagcatc

SEQ ID NO: 1550 - DNA, 20 bp, Artificial Sequence
  Synthetic: rene_1548_KAT7
gctatccactcatcaatcag

SEQ ID NO: 1551 - DNA, 20 bp, Artificial Sequence
  Synthetic: rene_1549_KAT7
tacagatctcgagcacacag

SEQ ID NO: 1552 - DNA, 20 bp, Artificial Sequence
  Synthetic: rene_1550_KAT8
ctggaccataagacactgta

SEQ ID NO: 1553 - DNA, 20 bp, Artificial Sequence
  Synthetic: rene_1551_KAT8
ctgtcagaacctgtgtctgc

SEQ ID NO: 1554 - DNA, 20 bp, Artificial Sequence
  Synthetic: rene_1552_KAT8
gtagttcccgatgtggatct

SEQ ID NO: 1555 - DNA, 20 bp, Artificial Sequence
  Synthetic: rene_1553_KAT8
gttgcgagtgatcttgcgct

SEQ ID NO: 1556 - DNA, 20 bp, Artificial Sequence
  Synthetic: rene_1554_KAT8
atgtacttgaggcagtactc

SEQ ID NO: 1557 - DNA, 20 bp, Artificial Sequence
  Synthetic: rene_1555_KAT8
tcaccattccccgaagacta

SEQ ID NO: 1558 - DNA, 20 bp, Artificial Sequence
  Synthetic: rene_1556_KAT8
aggtgctcctccaccagctt

SEQ ID NO: 1559 - DNA, 20 bp, Artificial Sequence
  Synthetic: rene_1557_KAT8
tccgatctccaccgtgactt

SEQ ID NO: 1560 - DNA, 20 bp, Artificial Sequence
  Synthetic: rene_1558_KDM1A
actaagaactcggcagtaat

SEQ ID NO: 1561 - DNA, 20 bp, Artificial Sequence
  Synthetic: rene_1559_KDM1A
gcagaaggcctagacattaa

SEQ ID NO: 1562 - DNA, 20 bp, Artificial Sequence
  Synthetic: rene_1560_KDM1A
catgataccagcagcttctc

SEQ ID NO: 1563 - DNA, 20 bp, Artificial Sequence
  Synthetic: rene_1561_KDM1A
cagatgatcctgcagcaaca

SEQ ID NO: 1564 - DNA, 20 bp, Artificial Sequence
  Synthetic: rene_1562_KDM1A
actatcttcttccaatgttc

SEQ ID NO: 1565 - DNA, 20 bp, Artificial Sequence
  Synthetic: rene_1563_KDM1A
atgtctaggccttctgctaa

SEQ ID NO: 1566 - DNA, 20 bp, Artificial Sequence
  Synthetic: rene_1564_KDM1A
gcaaaggaaactatgtagct

SEQ ID NO: 1567 - DNA, 20 bp, Artificial Sequence
  Synthetic: rene_1565_KDM1A
accggttgctagaagctaca

SEQ ID NO: 1568 - DNA, 20 bp, Artificial Sequence
  Synthetic: rene_1566_KDM1B
atggcagaccagcaactccc

SEQ ID NO: 1569 - DNA, 20 bp, Artificial Sequence
  Synthetic: rene_1567_KDM1B
tgaccagaaaaggtctcatc

SEQ ID NO: 1570 - DNA, 20 bp, Artificial Sequence
  Synthetic: rene_1568_KDM1B
ctggtgaccacactctgcta

SEQ ID NO: 1571 - DNA, 20 bp, Artificial Sequence
  Synthetic: rene_1569_KDM1B
ataccgcatcgataagtctt

SEQ ID NO: 1572 - DNA, 20 bp, Artificial Sequence
  Synthetic: rene_1570_KDM1B
gtcacgttcctcccagtgcc

SEQ ID NO: 1573 - DNA, 20 bp, Artificial Sequence
  Synthetic: rene_1571_KDM1B
cttggtaagctgcctccatt

SEQ ID NO: 1574 - DNA, 20 bp, Artificial Sequence
  Synthetic: rene_1572_KDM1B
tggtcataaaatacagtatt

SEQ ID NO: 1575 - DNA, 20 bp, Artificial Sequence
  Synthetic: rene_1573_KDM1B
ctgtcccaaaatctatacgg

SEQ ID NO: 1576 - DNA, 20 bp, Artificial Sequence
  Synthetic: rene_1574_KDM2A
ccagaggcagaatatctaac

SEQ ID NO: 1577 - DNA, 20 bp, Artificial Sequence
  Synthetic: rene_1575_KDM2A
gccacaccaggctggagaat

SEQ ID NO: 1578 - DNA, 20 bp, Artificial Sequence
  Synthetic: rene_1576_KDM2A
cctgacagcagccaattctc

SEQ ID NO: 1579 - DNA, 20 bp, Artificial Sequence
  Synthetic: rene_1577_KDM2A
gctatccattctactatgag

SEQ ID NO: 1580 - DNA, 20 bp, Artificial Sequence
  Synthetic: rene_1578_KDM2A
gccactgtactataggaact

SEQ ID NO: 1581 - DNA, 20 bp, Artificial Sequence
  Synthetic: rene_1579_KDM2A
gagtgatctgcttgcatcct

SEQ ID NO: 1582 - DNA, 20 bp, Artificial Sequence
  Synthetic: rene_1580_KDM2A
ccactactgcagagacatga

SEQ ID NO: 1583 - DNA, 20 bp, Artificial Sequence
  Synthetic: rene_1581_KDM2A
actgcatagggatgttgaag

SEQ ID NO: 1584 - DNA, 20 bp, Artificial Sequence
  Synthetic: rene_1582_KDM2B
gtggggggtgatcctctgca

SEQ ID NO: 1585 - DNA, 20 bp, Artificial Sequence
  Synthetic: rene_1583_KDM2B
cctgacagcacccactcctc

SEQ ID NO: 1586 - DNA, 20 bp, Artificial Sequence
  Synthetic: rene_1584_KDM2B
gctgattcctccaacgctgc

SEQ ID NO: 1587 - DNA, 20 bp, Artificial Sequence
  Synthetic: rene_1585_KDM2B
attgcagatggagcactcca

SEQ ID NO: 1588 - DNA, 20 bp, Artificial Sequence
  Synthetic: rene_1586_KDM2B
cgccgaacaccaaagagtct

SEQ ID NO: 1589 - DNA, 20 bp, Artificial Sequence
  Synthetic: rene_1587_KDM2B
ggtgccctgtccctgccctc

SEQ ID NO: 1590 - DNA, 20 bp, Artificial Sequence
  Synthetic: rene_1588_KDM2B
aactatgagtacgtacagag

SEQ ID NO: 1591 - DNA, 20 bp, Artificial Sequence
  Synthetic: rene_1589_KDM2B
acagtccgagacgtcaaact

SEQ ID NO: 1592 - DNA, 20 bp, Artificial Sequence
  Synthetic: rene_1590_KDM3A
gctgaacgaaagtcacctga

SEQ ID NO: 1593 - DNA, 20 bp, Artificial Sequence
  Synthetic: rene_1591_KDM3A
acagacccagctaaactcaa

SEQ ID NO: 1594 - DNA, 20 bp, Artificial Sequence
  Synthetic: rene_1592_KDM3A
gttaaaggtaaccacaagcc

SEQ ID NO: 1595 - DNA, 20 bp, Artificial Sequence
  Synthetic: rene_1593_KDM3A
gctgggtctgtcaaaaccga

SEQ ID NO: 1596 - DNA, 20 bp, Artificial Sequence
  Synthetic: rene_1594_KDM3A
gctggagaaaaaccgactct

SEQ ID NO: 1597 - DNA, 20 bp, Artificial Sequence
  Synthetic: rene_1595_KDM3A
ccacaccgacgttaccaaga

SEQ ID NO: 1598 - DNA, 20 bp, Artificial Sequence
  Synthetic: rene_1596_KDM3A
gagtatgtgtggactgctac

SEQ ID NO: 1599 - DNA, 20 bp, Artificial Sequence
  Synthetic: rene_1597_KDM3A
gtgttaagaagccttctacc

SEQ ID NO: 1600 - DNA, 20 bp, Artificial Sequence
  Synthetic: rene_1598_KDM3B
cctaccagtaactacttcac

SEQ ID NO: 1601 - DNA, 20 bp, Artificial Sequence
  Synthetic: rene_1599_KDM3B
acaggagaacaaagctcctt

SEQ ID NO: 1602 - DNA, 20 bp, Artificial Sequence
  Synthetic: rene_1600_KDM3B
gctgtagctctgcacaagag

SEQ ID NO: 1603 - DNA, 20 bp, Artificial Sequence
  Synthetic: rene_1601_KDM3B
ggacatgcattgaaaaaaca

SEQ ID NO: 1604 - DNA, 20 bp, Artificial Sequence
  Synthetic: rene_1602_KDM3B
cccaggagtgttgcttccag

SEQ ID NO: 1605 - DNA, 20 bp, Artificial Sequence
  Synthetic: rene_1603_KDM3B
tctgggggacaaatgtagac

SEQ ID NO: 1606 - DNA, 20 bp, Artificial Sequence
  Synthetic: rene_1604_KDM3B
aatgagtcccgactagaaga

SEQ ID NO: 1607 - DNA, 20 bp, Artificial Sequence
  Synthetic: rene_1605_KDM3B
tgtacccccgaaaccagcac

SEQ ID NO: 1608 - DNA, 20 bp, Artificial Sequence
  Synthetic: rene_1606_KDM4A
cctagaagagaataagaagt

SEQ ID NO: 1609 - DNA, 20 bp, Artificial Sequence
  Synthetic: rene_1607_KDM4A
gccccccagaagcagaggac

SEQ ID NO: 1610 - DNA, 20 bp, Artificial Sequence
  Synthetic: rene_1608_KDM4A
ccaggaagtgctcaaagctg

SEQ ID NO: 1611 - DNA, 20 bp, Artificial Sequence
  Synthetic: rene_1609_KDM4A
acagagaaagaggttaagca

SEQ ID NO: 1612 - DNA, 20 bp, Artificial Sequence
  Synthetic: rene_1610_KDM4A
actgtgcggagtctaccaat

SEQ ID NO: 1613 - DNA, 20 bp, Artificial Sequence
  Synthetic: rene_1611_KDM4A
atagagggtaccattcacat

SEQ ID NO: 1614 - DNA, 20 bp, Artificial Sequence
  Synthetic: rene_1612_KDM4A
ggaactcttccatagttgga

SEQ ID NO: 1615 - DNA, 20 bp, Artificial Sequence
  Synthetic: rene_1613_KDM4A
cccgttaatgctgaagaaat

SEQ ID NO: 1616 - DNA, 20 bp, Artificial Sequence
  Synthetic: rene_1614_KDM4B
gcccaaccatggaagaattt

SEQ ID NO: 1617 - DNA, 20 bp, Artificial Sequence
  Synthetic: rene_1615_KDM4B
cctacggctaccacgccggc

SEQ ID NO: 1618 - DNA, 20 bp, Artificial Sequence
  Synthetic: rene_1616_KDM4B
ccccatggagctgacggggc

SEQ ID NO: 1619 - DNA, 20 bp, Artificial Sequence
  Synthetic: rene_1617_KDM4B
cccagaagggtccgacctgg

SEQ ID NO: 1620 - DNA, 20 bp, Artificial Sequence
  Synthetic: rene_1618_KDM4B
gtctccatgcgacctgcccc

SEQ ID NO: 1621 - DNA, 20 bp, Artificial Sequence
  Synthetic: rene_1619_KDM4B
caaattgaagatggagatca

SEQ ID NO: 1622 - DNA, 20 bp, Artificial Sequence
  Synthetic: rene_1620_KDM4B
aggacgggtcccagctgacg

SEQ ID NO: 1623 - DNA, 20 bp, Artificial Sequence
  Synthetic: rene_1621_KDM4B
tccggggaggaagatgtgag

SEQ ID NO: 1624 - DNA, 20 bp, Artificial Sequence
  Synthetic: rene_1622_KDM4C
gaggtagacctagcacactg

SEQ ID NO: 1625 - DNA, 20 bp, Artificial Sequence
  Synthetic: rene_1623_KDM4C
agaggaggtgctcttaagca

SEQ ID NO: 1626 - DNA, 20 bp, Artificial Sequence
  Synthetic: rene_1624_KDM4C
gatgaagagttacccaagag

SEQ ID NO: 1627 - DNA, 20 bp, Artificial Sequence
  Synthetic: rene_1625_KDM4C
catgctccggaggtatagca

SEQ ID NO: 1628 - DNA, 20 bp, Artificial Sequence
  Synthetic: rene_1626_KDM4C
aagatggatcccagatagca

SEQ ID NO: 1629 - DNA, 20 bp, Artificial Sequence
  Synthetic: rene_1627_KDM4C
ctcacaaagatatccattga

SEQ ID NO: 1630 - DNA, 20 bp, Artificial Sequence
  Synthetic: rene_1628_KDM4C
aactgtgcagaatctacaaa

SEQ ID NO: 1631 - DNA, 20 bp, Artificial Sequence
  Synthetic: rene_1629_KDM4C
tagtgaagaaaatatagaat

SEQ ID NO: 1632 - DNA, 20 bp, Artificial Sequence
  Synthetic: rene_1630_KDM4D
gctccaaatcttcgaaattc

SEQ ID NO: 1633 - DNA, 20 bp, Artificial Sequence
  Synthetic: rene_1631_KDM4D
tgaggagggcgaccacgacc

SEQ ID NO: 1634 - DNA, 20 bp, Artificial Sequence
  Synthetic: rene_1632_KDM4D
atccaaccaaagaagagttt

SEQ ID NO: 1635 - DNA, 20 bp, Artificial Sequence
  Synthetic: rene_1633_KDM4D
cctatggctaccatgctggc

SEQ ID NO: 1636 - DNA, 20 bp, Artificial Sequence
  Synthetic: rene_1634_KDM4D
cttgagaactgtaggcgaga

SEQ ID NO: 1637 - DNA, 20 bp, Artificial Sequence
  Synthetic: rene_1635_KDM4D
cacatgccaaagtacaagta

SEQ ID NO: 1638 - DNA, 20 bp, Artificial Sequence
  Synthetic: rene_1636_KDM4D
ccactccgcgatggattgat

SEQ ID NO: 1639 - DNA, 20 bp, Artificial Sequence
  Synthetic: rene_1637_KDM4D
atgaaaacactaaacaatgg

SEQ ID NO: 1640 - DNA, 20 bp, Artificial Sequence
  Synthetic: rene_1638_KDM4E
cctggcacacagaggacatg

SEQ ID NO: 1641 - DNA, 20 bp, Artificial Sequence
  Synthetic: rene_1639_KDM4E
ggagaagcctcaggcccaga

SEQ ID NO: 1642 - DNA, 20 bp, Artificial Sequence
  Synthetic: rene_1640_KDM4E
ccactccacgatggattgat

SEQ ID NO: 1643 - DNA, 20 bp, Artificial Sequence
  Synthetic: rene_1641_KDM4E
cctatggctaccatgctggc

SEQ ID NO: 1644 - DNA, 20 bp, Artificial Sequence
  Synthetic: rene_1642_KDM4E
atgggtacaaggagtagagc

SEQ ID NO: 1645 - DNA, 20 bp, Artificial Sequence
  Synthetic: rene_1643_KDM4E
ggttgtaacagtgccctgag

SEQ ID NO: 1646 - DNA, 20 bp, Artificial Sequence
  Synthetic: rene_1644_KDM4E
cttgagaactgtaggcgaga

SEQ ID NO: 1647 - DNA, 20 bp, Artificial Sequence
  Synthetic: rene_1645_KDM4E
ggctccccaaagtgcaggta

SEQ ID NO: 1648 - DNA, 20 bp, Artificial Sequence
  Synthetic: rene_1646_KDM5A
ggaagaggaacacagctgtt

SEQ ID NO: 1649 - DNA, 20 bp, Artificial Sequence
  Synthetic: rene_1647_KDM5A
gtccgagtcctcccactatc

SEQ ID NO: 1650 - DNA, 20 bp, Artificial Sequence
  Synthetic: rene_1648_KDM5A
tctctaccacagggatcttc

SEQ ID NO: 1651 - DNA, 20 bp, Artificial Sequence
  Synthetic: rene_1649_KDM5A
ggtatcagtgctgagaacct

SEQ ID NO: 1652 - DNA, 20 bp, Artificial Sequence
  Synthetic: rene_1650_KDM5A
gccagggcagaggatagttc

SEQ ID NO: 1653 - DNA, 20 bp, Artificial Sequence
  Synthetic: rene_1651_KDM5A
atgggaatctcttcatcaca

SEQ ID NO: 1654 - DNA, 20 bp, Artificial Sequence
  Synthetic: rene_1652_KDM5A
ccactcccatatacaccaat

SEQ ID NO: 1655 - DNA, 20 bp, Artificial Sequence
  Synthetic: rene_1653_KDM5A
cccgaccacaaaacatacaa

SEQ ID NO: 1656 - DNA, 20 bp, Artificial Sequence
  Synthetic: rene_1654_KDM5B
atgccacatatatcagcagt

SEQ ID NO: 1657 - DNA, 20 bp, Artificial Sequence
  Synthetic: rene_1655_KDM5B
agagtacttccctgtaactc

SEQ ID NO: 1658 - DNA, 20 bp, Artificial Sequence
  Synthetic: rene_1656_KDM5B
actgaaagcaaggagactgc

SEQ ID NO: 1659 - DNA, 20 bp, Artificial Sequence
  Synthetic: rene_1657_KDM5B
ccacgatgagatgatctgca

SEQ ID NO: 1660 - DNA, 20 bp, Artificial Sequence
  Synthetic: rene_1658_KDM5B
agcagaacgaactaattcat

SEQ ID NO: 1661 - DNA, 20 bp, Artificial Sequence
  Synthetic: rene_1659_KDM5B
gaacaagcccgttggctaga

SEQ ID NO: 1662 - DNA, 20 bp, Artificial Sequence
  Synthetic: rene_1660_KDM5B
ccaggagcaaaccccatctt

SEQ ID NO: 1663 - DNA, 20 bp, Artificial Sequence
  Synthetic: rene_1661_KDM5B
gatgatatgagacgtctcat

SEQ ID NO: 1664 - DNA, 20 bp, Artificial Sequence
  Synthetic: rene_1662_KDM5C
ggttccaaccactggtagca

SEQ ID NO: 1665 - DNA, 20 bp, Artificial Sequence
  Synthetic: rene_1663_KDM5C
cctgtcagtgacagtaaacg

SEQ ID NO: 1666 - DNA, 20 bp, Artificial Sequence
  Synthetic: rene_1664_KDM5C
gtgtcccattcccaccaggc

SEQ ID NO: 1667 - DNA, 20 bp, Artificial Sequence
  Synthetic: rene_1665_KDM5C
ctgtcagccctggcctgcta

SEQ ID NO: 1668 - DNA, 20 bp, Artificial Sequence
  Synthetic: rene_1666_KDM5C
gaagaagtgatgaagaagct

SEQ ID NO: 1669 - DNA, 20 bp, Artificial Sequence
  Synthetic: rene_1667_KDM5C
atagggataaacaatgcgtt

SEQ ID NO: 1670 - DNA, 20 bp, Artificial Sequence
  Synthetic: rene_1668_KDM5C
ccagcctccagaactccttc

SEQ ID NO: 1671 - DNA, 20 bp, Artificial Sequence
  Synthetic: rene_1669_KDM5C
ctgtcactgacagggaaacc

SEQ ID NO: 1672 - DNA, 20 bp, Artificial Sequence
  Synthetic: rene_1670_KDM5D
actgaagctcctgttgaaca

SEQ ID NO: 1673 - DNA, 20 bp, Artificial Sequence
  Synthetic: rene_1671_KDM5D
ctgtcagcaatagcaaacaa

SEQ ID NO: 1674 - DNA, 20 bp, Artificial Sequence
  Synthetic: rene_1672_KDM5D
ggacctggcccatatatctg

SEQ ID NO: 1675 - DNA, 20 bp, Artificial Sequence
  Synthetic: rene_1673_KDM5D
gaggaggtgatgaagatgct

SEQ ID NO: 1676 - DNA, 20 bp, Artificial Sequence
  Synthetic: rene_1674_KDM5D
accaaaactctgcaaactgt

SEQ ID NO: 1677 - DNA, 20 bp, Artificial Sequence
  Synthetic: rene_1675_KDM5D
gttatgggtgccaagatagc

SEQ ID NO: 1678 - DNA, 20 bp, Artificial Sequence
  Synthetic: rene_1676_KDM5D
ataggggtaaataatgcgtt

SEQ ID NO: 1679 - DNA, 20 bp, Artificial Sequence
  Synthetic: rene_1677_KDM5D
gcagtggctttcctgtcagc

SEQ ID NO: 1680 - DNA, 20 bp, Artificial Sequence
  Synthetic: rene_1678_KDM6A
gtggaagctaacaatgaaca

SEQ ID NO: 1681 - DNA, 20 bp, Artificial Sequence
  Synthetic: rene_1679_KDM6A
acagaagtcattcagaacac

SEQ ID NO: 1682 - DNA, 20 bp, Artificial Sequence
  Synthetic: rene_1680_KDM6A
gagatactgaatagcatagc

SEQ ID NO: 1683 - DNA, 20 bp, Artificial Sequence
  Synthetic: rene_1681_KDM6A
ataggcaataatcatataac

SEQ ID NO: 1684 - DNA, 20 bp, Artificial Sequence
  Synthetic: rene_1682_KDM6A
acattgcccacttatatgaa

SEQ ID NO: 1685 - DNA, 20 bp, Artificial Sequence
  Synthetic: rene_1683_KDM6A
tgtggtgtcaaacaccatga

SEQ ID NO: 1686 - DNA, 20 bp, Artificial Sequence
  Synthetic: rene_1684_KDM6A
ccatcaacaaggcagagagc

SEQ ID NO: 1687 - DNA, 20 bp, Artificial Sequence
  Synthetic: rene_1685_KDM6A
atggggctctgagattcttc

SEQ ID NO: 1688 - DNA, 20 bp, Artificial Sequence
  Synthetic: rene_1686_KDM6B
gagggtctgtacagaactgc

SEQ ID NO: 1689 - DNA, 20 bp, Artificial Sequence
  Synthetic: rene_1687_KDM6B
gcaccaacatcgacttgtct

SEQ ID NO: 1690 - DNA, 20 bp, Artificial Sequence
  Synthetic: rene_1688_KDM6B
ctggggtgcccagaactact

SEQ ID NO: 1691 - DNA, 20 bp, Artificial Sequence
  Synthetic: rene_1689_KDM6B
tgtgggcactcaggattctc

SEQ ID NO: 1692 - DNA, 20 bp, Artificial Sequence
  Synthetic: rene_1690_KDM6B
cccccactccgctggaggac

SEQ ID NO: 1693 - DNA, 20 bp, Artificial Sequence
  Synthetic: rene_1691_KDM6B
ccctgcccagtctgtgaaac

SEQ ID NO: 1694 - DNA, 20 bp, Artificial Sequence
  Synthetic: rene_1692_KDM6B
ccggggcagcttctcctcag

SEQ ID NO: 1695 - DNA, 20 bp, Artificial Sequence
  Synthetic: rene_1693_KDM6B
aggagccagccgaattcaag

SEQ ID NO: 1696 - DNA, 20 bp, Artificial Sequence
  Synthetic: rene_1694_KDM7A
gctacaaaccaacatatggc

SEQ ID NO: 1697 - DNA, 20 bp, Artificial Sequence
  Synthetic: rene_1695_KDM7A
gctatatcagggacctccac

SEQ ID NO: 1698 - DNA, 20 bp, Artificial Sequence
  Synthetic: rene_1696_KDM7A
actatctgctgtataaagac

SEQ ID NO: 1699 - DNA, 20 bp, Artificial Sequence
  Synthetic: rene_1697_KDM7A
ggaccataatagggacatca

SEQ ID NO: 1700 - DNA, 20 bp, Artificial Sequence
  Synthetic: rene_1698_KDM7A
cacgtgtgaaatcagaactc

SEQ ID NO: 1701 - DNA, 20 bp, Artificial Sequence
  Synthetic: rene_1699_KDM7A
gggggaacttcctgcacaac

SEQ ID NO: 1702 - DNA, 20 bp, Artificial Sequence
  Synthetic: rene_1700_KDM7A
tgtgtagtcatgtctgtgcc

SEQ ID NO: 1703 - DNA, 20 bp, Artificial Sequence
  Synthetic: rene_1701_KDM7A
tgatgaaccttcctttctga

SEQ ID NO: 1704 - DNA, 20 bp, Artificial Sequence
  Synthetic: rene_1702_KDM8
gagtatatccaggagatcgc

SEQ ID NO: 1705 - DNA, 20 bp, Artificial Sequence
  Synthetic: rene_1703_KDM8
attccagatgtgaagttaga

SEQ ID NO: 1706 - DNA, 20 bp, Artificial Sequence
  Synthetic: rene_1704_KDM8
ccaaggccccattcctgtcc

SEQ ID NO: 1707 - DNA, 20 bp, Artificial Sequence
  Synthetic: rene_1705_KDM8
gtccccagggaaccatctcc

SEQ ID NO: 1708 - DNA, 20 bp, Artificial Sequence
  Synthetic: rene_1706_KDM8
accgggatgaacaggatctc

SEQ ID NO: 1709 - DNA, 20 bp, Artificial Sequence
  Synthetic: rene_1707_KDM8
ctggggatcctgatgtagtg

SEQ ID NO: 1710 - DNA, 20 bp, Artificial Sequence
  Synthetic: rene_1708_KDM8
gttccagggaggcccgtgat

SEQ ID NO: 1711 - DNA, 20 bp, Artificial Sequence
  Synthetic: rene_1709_KDM8
ctcctcctccccatcgccca

SEQ ID NO: 1712 - DNA, 20 bp, Artificial Sequence
  Synthetic: rene_1710_KLK1
aggtccacacactggagatc

SEQ ID NO: 1713 - DNA, 20 bp, Artificial Sequence
  Synthetic: rene_1711_KLK1
acgacgaaaacacagcccag

SEQ ID NO: 1714 - DNA, 20 bp, Artificial Sequence
  Synthetic: rene_1712_KLK1
gtcgtcaaacaagttgtggc

SEQ ID NO: 1715 - DNA, 20 bp, Artificial Sequence
  Synthetic: rene_1713_KLK1
cagatgatctccagtgtgtg

SEQ ID NO: 1716 - DNA, 20 bp, Artificial Sequence
  Synthetic: rene_1714_KLK1
gcttccggctggggcagcat

SEQ ID NO: 1717 - DNA, 20 bp, Artificial Sequence
  Synthetic: rene_1715_KLK1
ccaccttccaggtgtccgac

SEQ ID NO: 1718 - DNA, 20 bp, Artificial Sequence
  Synthetic: rene_1716_KLK1
cactcatcattaggcaggat

SEQ ID NO: 1719 - DNA, 20 bp, Artificial Sequence
  Synthetic: rene_1717_KLK1
ttcatgtcagtgagagcttc

SEQ ID NO: 1720 - DNA, 20 bp, Artificial Sequence
  Synthetic: rene_1718_KLK6
cctgacaccatccagtgtgc

SEQ ID NO: 1721 - DNA, 20 bp, Artificial Sequence
  Synthetic: rene_1719_KLK6
gatccagttcgtgtatctgc

SEQ ID NO: 1722 - DNA, 20 bp, Artificial Sequence
  Synthetic: rene_1720_KLK6
gctgggcgtgccaggcgcaa

SEQ ID NO: 1723 - DNA, 20 bp, Artificial Sequence
  Synthetic: rene_1721_KLK6
cagtgggcagctgtgaggac

SEQ ID NO: 1724 - DNA, 20 bp, Artificial Sequence
  Synthetic: rene_1722_KLK6
ccgaaggttatgcttcccca

SEQ ID NO: 1725 - DNA, 20 bp, Artificial Sequence
  Synthetic: rene_1723_KLK6
atccacaggggatgttaccc

SEQ ID NO: 1726 - DNA, 20 bp, Artificial Sequence
  Synthetic: rene_1724_KLRK1
ggaatacagcactccatatt

SEQ ID NO: 1727 - DNA, 20 bp, Artificial Sequence
  Synthetic: rene_1725_KLRK1
atgagagtaaaaactggtat

SEQ ID NO: 1728 - DNA, 20 bp, Artificial Sequence
  Synthetic: rene_1726_KLRK1
agacatacaagaagcctggc

SEQ ID NO: 1729 - DNA, 20 bp, Artificial Sequence
  Synthetic: rene_1727_KLRK1
cttaaactggtgaagtcata

SEQ ID NO: 1730 - DNA, 20 bp, Artificial Sequence
  Synthetic: rene_1728_KLRK1
ctctcatcaaaaaattggta

SEQ ID NO: 1731 - DNA, 20 bp, Artificial Sequence
  Synthetic: rene_1729_KLRK1
ttggaatgtgtactagtccc

SEQ ID NO: 1732 - DNA, 20 bp, Artificial Sequence
  Synthetic: rene_1730_KLRK1
tatatagcctttaaagctcg

SEQ ID NO: 1733 - DNA, 20 bp, Artificial Sequence
  Synthetic: rene_1731_KLRK1
aacacgatggcaaaagcaaa

SEQ ID NO: 1734 - DNA, 20 bp, Artificial Sequence
  Synthetic: rene_1732_KMT2A
ggtgagagcccagagtcatc

SEQ ID NO: 1735 - DNA, 20 bp, Artificial Sequence
  Synthetic: rene_1733_KMT2A
ccccaggctctcagactgaa

SEQ ID NO: 1736 - DNA, 20 bp, Artificial Sequence
  Synthetic: rene_1734_KMT2A
ggcttaccccactctatgga

SEQ ID NO: 1737 - DNA, 20 bp, Artificial Sequence
  Synthetic: rene_1735_KMT2A
gcagaagatgaagtggcaac

SEQ ID NO: 1738 - DNA, 20 bp, Artificial Sequence
  Synthetic: rene_1736_KMT2A
ccaccaaacatcagcaatcc

SEQ ID NO: 1739 - DNA, 20 bp, Artificial Sequence
  Synthetic: rene_1737_KMT2A
attggagggtcataatcctc

SEQ ID NO: 1740 - DNA, 20 bp, Artificial Sequence
  Synthetic: rene_1738_KMT2A
gatctagaacgacgaaaaaa

SEQ ID NO: 1741 - DNA, 20 bp, Artificial Sequence
  Synthetic: rene_1739_KMT2A
gaggggaaaacacagatgga

SEQ ID NO: 1742 - DNA, 20 bp, Artificial Sequence
  Synthetic: rene_1740_KMT2B
ccccaagcgaagcccacctg

SEQ ID NO: 1743 - DNA, 20 bp, Artificial Sequence
  Synthetic: rene_1741_KMT2B
gctggacctcactgacccgg

SEQ ID NO: 1744 - DNA, 20 bp, Artificial Sequence
  Synthetic: rene_1742_KMT2B
gccgtgtgaggatgaaaacc

SEQ ID NO: 1745 - DNA, 20 bp, Artificial Sequence
  Synthetic: rene_1743_KMT2B
ggggccctaacaccaagaag

SEQ ID NO: 1746 - DNA, 20 bp, Artificial Sequence
  Synthetic: rene_1744_KMT2B
ccccacggctcccacctcct

SEQ ID NO: 1747 - DNA, 20 bp, Artificial Sequence
  Synthetic: rene_1745_KMT2B
ggggggtcttcatccataaa

SEQ ID NO: 1748 - DNA, 20 bp, Artificial Sequence
  Synthetic: rene_1746_KMT2B
gaggaggggaggcccaccgt

SEQ ID NO: 1749 - DNA, 20 bp, Artificial Sequence
  Synthetic: rene_1747_KMT2B
gcccttgaaacaaacttgat

SEQ ID NO: 1750 - DNA, 20 bp, Artificial Sequence
  Synthetic: rene_1748_KMT2C
cctgcacaccctgagaaaaa

SEQ ID NO: 1751 - DNA, 20 bp, Artificial Sequence
  Synthetic: rene_1749_KMT2C
ccctagagactactgtcaca

SEQ ID NO: 1752 - DNA, 20 bp, Artificial Sequence
  Synthetic: rene_1750_KMT2C
cctggatggcaacccaacag

SEQ ID NO: 1753 - DNA, 20 bp, Artificial Sequence
  Synthetic: rene_1751_KMT2C
aatgtccccttagggattac

SEQ ID NO: 1754 - DNA, 20 bp, Artificial Sequence
  Synthetic: rene_1752_KMT2C
gcttctacaccaacagagac

SEQ ID NO: 1755 - DNA, 20 bp, Artificial Sequence
  Synthetic: rene_1753_KMT2C
gatacagaggatggcaaggt

SEQ ID NO: 1756 - DNA, 20 bp, Artificial Sequence
  Synthetic: rene_1754_KMT2C
gcttgtgcagttgatgaata

SEQ ID NO: 1757 - DNA, 20 bp, Artificial Sequence
  Synthetic: rene_1755_KMT2C
ccagcagcacctccagtagc

SEQ ID NO: 1758 - DNA, 20 bp, Artificial Sequence
  Synthetic: rene_1756_KMT2D
gctgggtcccaacagcagct

SEQ ID NO: 1759 - DNA, 20 bp, Artificial Sequence
  Synthetic: rene_1757_KMT2D
cctgagggccttacacctgc

SEQ ID NO: 1760 - DNA, 20 bp, Artificial Sequence
  Synthetic: rene_1758_KMT2D
attggcagccccactacccc

SEQ ID NO: 1761 - DNA, 20 bp, Artificial Sequence
  Synthetic: rene_1759_KMT2D
tgtcagccacacaccttcga

SEQ ID NO: 1762 - DNA, 20 bp, Artificial Sequence
  Synthetic: rene_1760_KMT2D
ggctgcccactgtgtgacat

SEQ ID NO: 1763 - DNA, 20 bp, Artificial Sequence
  Synthetic: rene_1761_KMT2D
tgtgggggaagacctgatac

SEQ ID NO: 1764 - DNA, 20 bp, Artificial Sequence
  Synthetic: rene_1762_KMT2D
ggcagaaagtatggtatcct

SEQ ID NO: 1765 - DNA, 20 bp, Artificial Sequence
  Synthetic: rene_1763_KMT2D
gccgggcccgtcctctacca

SEQ ID NO: 1766 - DNA, 20 bp, Artificial Sequence
  Synthetic: rene_1764_KMT2E
actacaccactaaaaaaacg

SEQ ID NO: 1767 - DNA, 20 bp, Artificial Sequence
  Synthetic: rene_1765_KMT2E
gatgggagacaaagatcaaa

SEQ ID NO: 1768 - DNA, 20 bp, Artificial Sequence
  Synthetic: rene_1766_KMT2E
ctcagaaacctccacaccta

SEQ ID NO: 1769 - DNA, 20 bp, Artificial Sequence
  Synthetic: rene_1767_KMT2E
gagtagaataacacaaaagg

SEQ ID NO: 1770 - DNA, 20 bp, Artificial Sequence
  Synthetic: rene_1768_KMT2E
actgaactgggtctgcaaga

SEQ ID NO: 1771 - DNA, 20 bp, Artificial Sequence
  Synthetic: rene_1769_KMT2E
ccaacaccagctacagttta

SEQ ID NO: 1772 - DNA, 20 bp, Artificial Sequence
  Synthetic: rene_1770_KMT2E
gctgtgctgatcctttccaa

SEQ ID NO: 1773 - DNA, 20 bp, Artificial Sequence
  Synthetic: rene_1771_KMT2E
gcttctgggcatcataccac

SEQ ID NO: 1774 - DNA, 20 bp, Artificial Sequence
  Synthetic: rene_1772_KMT5A
ccccttcaggaagagaactc

SEQ ID NO: 1775 - DNA, 20 bp, Artificial Sequence
  Synthetic: rene_1773_KMT5A
ctgtagattccggctaatgg

SEQ ID NO: 1776 - DNA, 20 bp, Artificial Sequence
  Synthetic: rene_1774_KMT5A
ctcagatactgaaaatagta

SEQ ID NO: 1777 - DNA, 20 bp, Artificial Sequence
  Synthetic: rene_1775_KMT5A
gaggttctgctgcttcagat

SEQ ID NO: 1778 - DNA, 20 bp, Artificial Sequence
  Synthetic: rene_1776_KMT5A
ccgggcagtcaaagatctat

SEQ ID NO: 1779 - DNA, 20 bp, Artificial Sequence
  Synthetic: rene_1777_KMT5A
gaaaaggtaccaggggacct

SEQ ID NO: 1780 - DNA, 20 bp, Artificial Sequence
  Synthetic: rene_1778_KMT5A
gtttggaaaaggtaccaggg

SEQ ID NO: 1781 - DNA, 20 bp, Artificial Sequence
  Synthetic: rene_1779_KMT5A
gtttggcagttcccacattt

SEQ ID NO: 1782 - DNA, 20 bp, Artificial Sequence
  Synthetic: rene_1780_KMT5B
atgaagcccctctgtataag

SEQ ID NO: 1783 - DNA, 20 bp, Artificial Sequence
  Synthetic: rene_1781_KMT5B
cttgtggagtacatgacact

SEQ ID NO: 1784 - DNA, 20 bp, Artificial Sequence
  Synthetic: rene_1782_KMT5B
tccaaagaacccatctccat

SEQ ID NO: 1785 - DNA, 20 bp, Artificial Sequence
  Synthetic: rene_1783_KMT5B
gacatgcctgtgtcactctt

SEQ ID NO: 1786 - DNA, 20 bp, Artificial Sequence
  Synthetic: rene_1784_KMT5B
atgggtccccattctgacca

SEQ ID NO: 1787 - DNA, 20 bp, Artificial Sequence
  Synthetic: rene_1785_KMT5B
actcaggatcaggcagtagt

SEQ ID NO: 1788 - DNA, 20 bp, Artificial Sequence
  Synthetic: rene_1786_KMT5B
ctgagtggtatctgcatcag

SEQ ID NO: 1789 - DNA, 20 bp, Artificial Sequence
  Synthetic: rene_1787_KMT5B
tccatgtctaagtagcatgt

SEQ ID NO: 1790 - DNA, 20 bp, Artificial Sequence
  Synthetic: rene_1788_KMT5C
cgcacccataagatgaacgt

SEQ ID NO: 1791 - DNA, 20 bp, Artificial Sequence
  Synthetic: rene_1789_KMT5C
ccatcctgccctgcacgcgc

SEQ ID NO: 1792 - DNA, 20 bp, Artificial Sequence
  Synthetic: rene_1790_KMT5C
ctgaggcagcgggacctgga

SEQ ID NO: 1793 - DNA, 20 bp, Artificial Sequence
  Synthetic: rene_1791_KMT5C
tgcctgcagatgggaacgca

SEQ ID NO: 1794 - DNA, 20 bp, Artificial Sequence
  Synthetic: rene_1792_KMT5C
cagcgctgagcgcaggtgct

SEQ ID NO: 1795 - DNA, 20 bp, Artificial Sequence
  Synthetic: rene_1793_KMT5C
cggcaggaaggcacggaggt

SEQ ID NO: 1796 - DNA, 20 bp, Artificial Sequence
  Synthetic: rene_1794_KMT5C
cgaaccaggcctagggagcc

SEQ ID NO: 1797 - DNA, 20 bp, Artificial Sequence
  Synthetic: rene_1795_L3MBTL1
cttcctgaagatgatctgag

SEQ ID NO: 1798 - DNA, 20 bp, Artificial Sequence
  Synthetic: rene_1796_L3MBTL1
cccgggagccaatccatgtg

SEQ ID NO: 1799 - DNA, 20 bp, Artificial Sequence
  Synthetic: rene_1797_L3MBTL1
tggatcgacgctgaccaccc

SEQ ID NO: 1800 - DNA, 20 bp, Artificial Sequence
  Synthetic: rene_1798_L3MBTL1
aggagctcagaagcgctggt

SEQ ID NO: 1801 - DNA, 20 bp, Artificial Sequence
  Synthetic: rene_1799_L3MBTL1
tgccaccgtcctgccgcagc

SEQ ID NO: 1802 - DNA, 20 bp, Artificial Sequence
  Synthetic: rene_1800_L3MBTL1
tccgatggtcctccacatcc

SEQ ID NO: 1803 - DNA, 20 bp, Artificial Sequence
  Synthetic: rene_1801_L3MBTL1
atgggtattctgagtgccat

SEQ ID NO: 1804 - DNA, 20 bp, Artificial Sequence
  Synthetic: rene_1802_L3MBTL1
atggctggagtcatggctat

SEQ ID NO: 1805 - DNA, 20 bp, Artificial Sequence
  Synthetic: rene_1803_L3MBTL2
atgaggtagcccttccagtc

SEQ ID NO: 1806 - DNA, 20 bp, Artificial Sequence
  Synthetic: rene_1804_L3MBTL2
gcagaccaggcagccttgtg

SEQ ID NO: 1807 - DNA, 20 bp, Artificial Sequence
  Synthetic: rene_1805_L3MBTL2
gcggtgtgagctcaatgtca

SEQ ID NO: 1808 - DNA, 20 bp, Artificial Sequence
  Synthetic: rene_1806_L3MBTL2
accgtggccacacagatgag

SEQ ID NO: 1809 - DNA, 20 bp, Artificial Sequence
  Synthetic: rene_1807_L3MBTL2
atcacatcctcccactggtc

SEQ ID NO: 1810 - DNA, 20 bp, Artificial Sequence
  Synthetic: rene_1808_L3MBTL2
tgcttcacttgactcctcca

SEQ ID NO: 1811 - DNA, 20 bp, Artificial Sequence
  Synthetic: rene_1809_L3MBTL2
aaagccttcataccgaagca

SEQ ID NO: 1812 - DNA, 20 bp, Artificial Sequence
  Synthetic: rene_1810_L3MBTL2
aactgggagaactacttgga

SEQ ID NO: 1813 - DNA, 20 bp, Artificial Sequence
  Synthetic: rene_1811_L3MBTL3
actggatccttcaacctgaa

SEQ ID NO: 1814 - DNA, 20 bp, Artificial Sequence
  Synthetic: rene_1812_L3MBTL3
aggggaagaagagctttcat

SEQ ID NO: 1815 - DNA, 20 bp, Artificial Sequence
  Synthetic: rene_1813_L3MBTL3
ctccagaaagacactcatct

SEQ ID NO: 1816 - DNA, 20 bp, Artificial Sequence
  Synthetic: rene_1814_L3MBTL3
aattccatcctgatgttcaa

SEQ ID NO: 1817 - DNA, 20 bp, Artificial Sequence
  Synthetic: rene_1815_L3MBTL3
gtacagccgaatcccctcgt

SEQ ID NO: 1818 - DNA, 20 bp, Artificial Sequence
  Synthetic: rene_1816_L3MBTL3
tacttatgactcaaacagac

SEQ ID NO: 1819 - DNA, 20 bp, Artificial Sequence
  Synthetic: rene_1817_L3MBTL3
agagaagactgggatgcctt

SEQ ID NO: 1820 - DNA, 20 bp, Artificial Sequence
  Synthetic: rene_1818_L3MBTL3
aagagagaacagaaagtgaa

SEQ ID NO: 1821 - DNA, 20 bp, Artificial Sequence
  Synthetic: rene_1819_L3MBTL4
gaatcagactcttcacattc

SEQ ID NO: 1822 - DNA, 20 bp, Artificial Sequence
  Synthetic: rene_1820_L3MBTL4
gctgcccgtattcagacatg

SEQ ID NO: 1823 - DNA, 20 bp, Artificial Sequence
  Synthetic: rene_1821_L3MBTL4
agagaacaaacacaggcaaa

SEQ ID NO: 1824 - DNA, 20 bp, Artificial Sequence
  Synthetic: rene_1822_L3MBTL4
acaccatcctactggatgaa

SEQ ID NO: 1825 - DNA, 20 bp, Artificial Sequence
  Synthetic: rene_1823_L3MBTL4
aatgtgaagagtctgattcc

SEQ ID NO: 1826 - DNA, 20 bp, Artificial Sequence
  Synthetic: rene_1824_L3MBTL4
ctggacagaatacctggaag

SEQ ID NO: 1827 - DNA, 20 bp, Artificial Sequence
  Synthetic: rene_1825_L3MBTL4
agattggaatgagattagaa

SEQ ID NO: 1828 - DNA, 20 bp, Artificial Sequence
  Synthetic: rene_1826_L3MBTL4
tggttaccgtctaagacttc

SEQ ID NO: 1829 - DNA, 20 bp, Artificial Sequence
  Synthetic: rene_1827_LAG3
tgtggagctctctggacacc

SEQ ID NO: 1830 - DNA, 20 bp, Artificial Sequence
  Synthetic: rene_1828_LAG3
tcaggaccttggctggaggc

SEQ ID NO: 1831 - DNA, 20 bp, Artificial Sequence
  Synthetic: rene_1829_LAG3
tgccttagagcaagggattc

SEQ ID NO: 1832 - DNA, 20 bp, Artificial Sequence
  Synthetic: rene_1830_LAG3
cccttcgactagaggatgtg

SEQ ID NO: 1833 - DNA, 20 bp, Artificial Sequence
  Synthetic: rene_1831_LAG3
tgaggtgactccagtatctg

SEQ ID NO: 1834 - DNA, 20 bp, Artificial Sequence
  Synthetic: rene_1832_LAG3
ctcactgccaagtggactcc

SEQ ID NO: 1835 - DNA, 20 bp, Artificial Sequence
  Synthetic: rene_1833_LAG3
gtgactggagcctttggctt

SEQ ID NO: 1836 - DNA, 20 bp, Artificial Sequence
  Synthetic: rene_1834_LAG3
gctttcacctttggagaaga

SEQ ID NO: 1837 - DNA, 20 bp, Artificial Sequence
  Synthetic: rene_1835_LBR
acttccacttccctccttgc

SEQ ID NO: 1838 - DNA, 20 bp, Artificial Sequence
  Synthetic: rene_1836_LBR
tcctgacatctgcagtcatc

SEQ ID NO: 1839 - DNA, 20 bp, Artificial Sequence
  Synthetic: rene_1837_LBR
gaaatagcatcagcagatat

SEQ ID NO: 1840 - DNA, 20 bp, Artificial Sequence
  Synthetic: rene_1838_LBR
ccataactcatacaaagctg

SEQ ID NO: 1841 - DNA, 20 bp, Artificial Sequence
  Synthetic: rene_1839_LBR
agccaaaagcatcaccaagt

SEQ ID NO: 1842 - DNA, 20 bp, Artificial Sequence
  Synthetic: rene_1840_LBR
gctgaaatgaaaatacagga

SEQ ID NO: 1843 - DNA, 20 bp, Artificial Sequence
  Synthetic: rene_1841_LBR
atttcagccaaaagcatcac

SEQ ID NO: 1844 - DNA, 20 bp, Artificial Sequence
  Synthetic: rene_1842_LBR
cctcctcctttgccagcttt

SEQ ID NO: 1845 - DNA, 20 bp, Artificial Sequence
  Synthetic: rene_1843_LCK
tcaagaccccttcaggcatc

SEQ ID NO: 1846 - DNA, 20 bp, Artificial Sequence
  Synthetic: rene_1844_LCK
ccattaagtggacagcgcca

SEQ ID NO: 1847 - DNA, 20 bp, Artificial Sequence
  Synthetic: rene_1845_LCK
ggatcctgctgacggaaatt

SEQ ID NO: 1848 - DNA, 20 bp, Artificial Sequence
  Synthetic: rene_1846_LCK
cgtcagcaggatcccaaaag

SEQ ID NO: 1849 - DNA, 20 bp, Artificial Sequence
  Synthetic: rene_1847_LCK
actgtcggtccgggacttcg

SEQ ID NO: 1850 - DNA, 20 bp, Artificial Sequence
  Synthetic: rene_1848_LCK
accacctctccctggttctg

SEQ ID NO: 1851 - DNA, 20 bp, Artificial Sequence
  Synthetic: rene_1849_LCK
gcctagcacgcctcattgag

SEQ ID NO: 1852 - DNA, 20 bp, Artificial Sequence
  Synthetic: rene_1850_LCK
ccggcctgcatgaactggtc

SEQ ID NO: 1853 - DNA, 20 bp, Artificial Sequence
  Synthetic: rene_1851_LILRB4
ccctcagacagaaggcaact

SEQ ID NO: 1854 - DNA, 20 bp, Artificial Sequence
  Synthetic: rene_1852_LILRB4
accttggcatacgtcactgc

SEQ ID NO: 1855 - DNA, 20 bp, Artificial Sequence
  Synthetic: rene_1853_LILRB4
tctcctaggtctggagtgtt

SEQ ID NO: 1856 - DNA, 20 bp, Artificial Sequence
  Synthetic: rene_1854_LILRB4
tgtccaggaattccccagac

SEQ ID NO: 1857 - DNA, 20 bp, Artificial Sequence
  Synthetic: rene_1855_LILRB4
tccctggacgtcagcagctg

SEQ ID NO: 1858 - DNA, 20 bp, Artificial Sequence
  Synthetic: rene_1856_LILRB4
caccccgtcctcaggctgtg

SEQ ID NO: 1859 - DNA, 20 bp, Artificial Sequence
  Synthetic: rene_1857_LILRB4
tccagacggtactcccgagc

SEQ ID NO: 1860 - DNA, 20 bp, Artificial Sequence
  Synthetic: rene_1858_LILRB4
ctctttatccagacggtact

SEQ ID NO: 1861 - DNA, 20 bp, Artificial Sequence
  Synthetic: rene_1859_LY75
ggtgaagatcagcaacaaac

SEQ ID NO: 1862 - DNA, 20 bp, Artificial Sequence
  Synthetic: rene_1860_LY75
ccatctgaccaaccaaagtt

SEQ ID NO: 1863 - DNA, 20 bp, Artificial Sequence
  Synthetic: rene_1861_LY75
ataagaccccactgtcatat

SEQ ID NO: 1864 - DNA, 20 bp, Artificial Sequence
  Synthetic: rene_1862_LY75
gcatgtgccttatcccagga

SEQ ID NO: 1865 - DNA, 20 bp, Artificial Sequence
  Synthetic: rene_1863_LY75
atctcgaatactcagaatat

SEQ ID NO: 1866 - DNA, 20 bp, Artificial Sequence
  Synthetic: rene_1864_LY75
ccagcagatagcaaaatcca

SEQ ID NO: 1867 - DNA, 20 bp, Artificial Sequence
  Synthetic: rene_1865_LY75
gttgtgaacgcttgccaagt

SEQ ID NO: 1868 - DNA, 20 bp, Artificial Sequence
  Synthetic: rene_1866_LY75
gctgcagaatctgggctgta

SEQ ID NO: 1869 - DNA, 20 bp, Artificial Sequence
  Synthetic: rene_1867_LYN
cctggacagaggtttcaaac

SEQ ID NO: 1870 - DNA, 20 bp, Artificial Sequence
  Synthetic: rene_1868_LYN
cctgtatcagcgacatgatt

SEQ ID NO: 1871 - DNA, 20 bp, Artificial Sequence
  Synthetic: rene_1869_LYN
gtataggaggattccaaagg

SEQ ID NO: 1872 - DNA, 20 bp, Artificial Sequence
  Synthetic: rene_1870_LYN
gccttgctagagtaattgaa

SEQ ID NO: 1873 - DNA, 20 bp, Artificial Sequence
  Synthetic: rene_1871_LYN
acagccaccttggtactgtt

SEQ ID NO: 1874 - DNA, 20 bp, Artificial Sequence
  Synthetic: rene_1872_LYN
tgtgagagatccaacgtcca

SEQ ID NO: 1875 - DNA, 20 bp, Artificial Sequence
  Synthetic: rene_1873_LYN
ataatgtcatagagctcatc

SEQ ID NO: 1876 - DNA, 20 bp, Artificial Sequence
  Synthetic: rene_1874_LYN
aaggatataaccaggaagga

SEQ ID NO: 1877 - DNA, 20 bp, Artificial Sequence
  Synthetic: rene_1875_MAN2B1
gttgtgaaggaccccaatgg

SEQ ID NO: 1878 - DNA, 20 bp, Artificial Sequence
  Synthetic: rene_1876_MAN2B1
ccaacagctaaacatcagca

SEQ ID NO: 1879 - DNA, 20 bp, Artificial Sequence
  Synthetic: rene_1877_MAN2B1
gctgttggcaaaaggtgaag

SEQ ID NO: 1880 - DNA, 20 bp, Artificial Sequence
  Synthetic: rene_1878_MAN2B1
gttgtcacctatactggcgt

SEQ ID NO: 1881 - DNA, 20 bp, Artificial Sequence
  Synthetic: rene_1879_MAN2B1
ggaagtaatcgaccagctcc

SEQ ID NO: 1882 - DNA, 20 bp, Artificial Sequence
  Synthetic: rene_1880_MAN2B1
cgtggagattgccttcttct

SEQ ID NO: 1883 - DNA, 20 bp, Artificial Sequence
  Synthetic: rene_1881_MAN2B1
ccagccggatgagcttgtca

SEQ ID NO: 1884 - DNA, 20 bp, Artificial Sequence
  Synthetic: rene_1882_MAN2B1
ccgtaggagaggattccgga

SEQ ID NO: 1885 - DNA, 20 bp, Artificial Sequence
  Synthetic: rene_1883_MANSC1
ctctgatcaagaaatagctc

SEQ ID NO: 1886 - DNA, 20 bp, Artificial Sequence
  Synthetic: rene_1884_MANSC1
gagtgtcgaagatcatcaag

SEQ ID NO: 1887 - DNA, 20 bp, Artificial Sequence
  Synthetic: rene_1885_MANSC1
cagaaatctccaacctaact

SEQ ID NO: 1888 - DNA, 20 bp, Artificial Sequence
  Synthetic: rene_1886_MANSC1
aatggacaggcttcctcgtt

SEQ ID NO: 1889 - DNA, 20 bp, Artificial Sequence
  Synthetic: rene_1887_MANSC1
aaatggaaggccgtactgat

SEQ ID NO: 1890 - DNA, 20 bp, Artificial Sequence
  Synthetic: rene_1888_MANSC1
cttataagcaaggagctggg

SEQ ID NO: 1891 - DNA, 20 bp, Artificial Sequence
  Synthetic: rene_1889_MANSC1
tgtcccaacgaggaagcctg

SEQ ID NO: 1892 - DNA, 20 bp, Artificial Sequence
  Synthetic: rene_1890_MANSC1
agatggatgaagcaagtgcc

SEQ ID NO: 1893 - DNA, 20 bp, Artificial Sequence
  Synthetic: rene_1891_MAP3K1
gctgtagcagcaatagtagt

SEQ ID NO: 1894 - DNA, 20 bp, Artificial Sequence
  Synthetic: rene_1892_MAP3K1
tctacaattccacagaaact

SEQ ID NO: 1895 - DNA, 20 bp, Artificial Sequence
  Synthetic: rene_1893_MAP3K1
tgtggaattgtagagaaaac

SEQ ID NO: 1896 - DNA, 20 bp, Artificial Sequence
  Synthetic: rene_1894_MAP3K1
gcggaaagaatcaaacttca

SEQ ID NO: 1897 - DNA, 20 bp, Artificial Sequence
  Synthetic: rene_1895_MAP3K1
agacataatcaacaccacca

SEQ ID NO: 1898 - DNA, 20 bp, Artificial Sequence
  Synthetic: rene_1896_MAP3K1
agagtggcagaatcacacca

SEQ ID NO: 1899 - DNA, 20 bp, Artificial Sequence
  Synthetic: rene_1897_MAP3K1
agtaggaccttctagttcaa

SEQ ID NO: 1900 - DNA, 20 bp, Artificial Sequence
  Synthetic: rene_1898_MAP3K1
gtatgtcctggtagagtctc

SEQ ID NO: 1901 - DNA, 20 bp, Artificial Sequence
  Synthetic: rene_1899_MAP3K8
catgagcccagaggtcatcc

SEQ ID NO: 1902 - DNA, 20 bp, Artificial Sequence
  Synthetic: rene_1900_MAP3K8
accccacaggactgcgccat

SEQ ID NO: 1903 - DNA, 20 bp, Artificial Sequence
  Synthetic: rene_1901_MAP3K8
tccagaacagaccctccctc

SEQ ID NO: 1904 - DNA, 20 bp, Artificial Sequence
  Synthetic: rene_1902_MAP3K8
ctaaggacctccgaggaaca

SEQ ID NO: 1905 - DNA, 20 bp, Artificial Sequence
  Synthetic: rene_1903_MAP3K8
tctccagggaagcttctatc

SEQ ID NO: 1906 - DNA, 20 bp, Artificial Sequence
  Synthetic: rene_1904_MAP3K8
aatgtgtctgatgtaataga

SEQ ID NO: 1907 - DNA, 20 bp, Artificial Sequence
  Synthetic: rene_1905_MAP3K8
gcctaagtgttcaaatgacc

SEQ ID NO: 1908 - DNA, 20 bp, Artificial Sequence
  Synthetic: rene_1906_MAP3K8
agtgtagaaaatcaagtccc

SEQ ID NO: 1909 - DNA, 20 bp, Artificial Sequence
  Synthetic: rene_1907_MAP7D2
actggtcccccgacattccc

SEQ ID NO: 1910 - DNA, 20 bp, Artificial Sequence
  Synthetic: rene_1908_MAP7D2
gtccagagacaccccaggaa

SEQ ID NO: 1911 - DNA, 20 bp, Artificial Sequence
  Synthetic: rene_1909_MAP7D2
gccagaagcagagcttcagt

SEQ ID NO: 1912 - DNA, 20 bp, Artificial Sequence
  Synthetic: rene_1910_MAP7D2
gagtgggtgaagacttgtaa

SEQ ID NO: 1913 - DNA, 20 bp, Artificial Sequence
  Synthetic: rene_1911_MAP7D2
tcttccacagcagctctctt

SEQ ID NO: 1914 - DNA, 20 bp, Artificial Sequence
  Synthetic: rene_1912_MAP7D2
ccatcaagggcatccagatg

SEQ ID NO: 1915 - DNA, 20 bp, Artificial Sequence
  Synthetic: rene_1913_MAP7D2
tggaggcattcctaagagac

SEQ ID NO: 1916 - DNA, 20 bp, Artificial Sequence
  Synthetic: rene_1914_MAP7D2
gcgactgttgacacccacac

SEQ ID NO: 1917 - DNA, 20 bp, Artificial Sequence
  Synthetic: rene_1915_MBD5
catccaacagcacttcaaac

SEQ ID NO: 1918 - DNA, 20 bp, Artificial Sequence
  Synthetic: rene_1916_MBD5
cagatcccagtatgaactct

SEQ ID NO: 1919 - DNA, 20 bp, Artificial Sequence
  Synthetic: rene_1917_MBD5
acagcagctccaggatcaaa

SEQ ID NO: 1920 - DNA, 20 bp, Artificial Sequence
  Synthetic: rene_1918_MBD5
ggagatgctgttgattcact

SEQ ID NO: 1921 - DNA, 20 bp, Artificial Sequence
  Synthetic: rene_1919_MBD5
aggtataataactacaaaag

SEQ ID NO: 1922 - DNA, 20 bp, Artificial Sequence
  Synthetic: rene_1920_MBD5
aggagagactagagaacact

SEQ ID NO: 1923 - DNA, 20 bp, Artificial Sequence
  Synthetic: rene_1921_MBD5
ctctcagcagcagccaaagc

SEQ ID NO: 1924 - DNA, 20 bp, Artificial Sequence
  Synthetic: rene_1922_MBD5
ggagagctgcatcttcctgc

SEQ ID NO: 1925 - DNA, 20 bp, Artificial Sequence
  Synthetic: rene_1923_MBTD1
cctgaggtagtcaaaccatt

SEQ ID NO: 1926 - DNA, 20 bp, Artificial Sequence
  Synthetic: rene_1924_MBTD1
acagaaaccgacagggaaaa

SEQ ID NO: 1927 - DNA, 20 bp, Artificial Sequence
  Synthetic: rene_1925_MBTD1
atatgtgtagccacagtaac

SEQ ID NO: 1928 - DNA, 20 bp, Artificial Sequence
  Synthetic: rene_1926_MBTD1
agctggggtaactacatcaa

SEQ ID NO: 1929 - DNA, 20 bp, Artificial Sequence
  Synthetic: rene_1927_MBTD1
atgggtctatagcttccaat

SEQ ID NO: 1930 - DNA, 20 bp, Artificial Sequence
  Synthetic: rene_1928_MBTD1
ccatctgggtatgtgtagac

SEQ ID NO: 1931 - DNA, 20 bp, Artificial Sequence
  Synthetic: rene_1929_MBTD1
actagaaaagctttccagtt

SEQ ID NO: 1932 - DNA, 20 bp, Artificial Sequence
  Synthetic: rene_1930_MBTD1
gcaccagtaagtcgtttcac

SEQ ID NO: 1933 - DNA, 20 bp, Artificial Sequence
  Synthetic: rene_1931_MDFIC
caagcagtctgatgattcac

SEQ ID NO: 1934 - DNA, 20 bp, Artificial Sequence
  Synthetic: rene_1932_MDFIC
cagacaagctggactgaatt

SEQ ID NO: 1935 - DNA, 20 bp, Artificial Sequence
  Synthetic: rene_1933_MDFIC
cccaaatggactggtcttgc

SEQ ID NO: 1936 - DNA, 20 bp, Artificial Sequence
  Synthetic: rene_1934_MDFIC
ccaaaagacaggctcttcac

SEQ ID NO: 1937 - DNA, 20 bp, Artificial Sequence
  Synthetic: rene_1935_MDFIC
tcaaaaaatgcatagaaaaa

SEQ ID NO: 1938 - DNA, 20 bp, Artificial Sequence
  Synthetic: rene_1936_MDFIC
ggaaaagacagcatttactt

SEQ ID NO: 1939 - DNA, 20 bp, Artificial Sequence
  Synthetic: rene_1937_MDFIC
gggaaatccttcggatggtg

SEQ ID NO: 1940 - DNA, 20 bp, Artificial Sequence
  Synthetic: rene_1938_MDFIC
gccccgtggtgaattccatt

SEQ ID NO: 1941 - DNA, 20 bp, Artificial Sequence
  Synthetic: rene_1939_MECOM
gacagacacctaaagaaaca

SEQ ID NO: 1942 - DNA, 20 bp, Artificial Sequence
  Synthetic: rene_1940_MECOM
catgcagtactcctcactca

SEQ ID NO: 1943 - DNA, 20 bp, Artificial Sequence
  Synthetic: rene_1941_MECOM
catgaaggaaaccctgagga

SEQ ID NO: 1944 - DNA, 20 bp, Artificial Sequence
  Synthetic: rene_1942_MECOM
aaggcactatctaaacaccc

SEQ ID NO: 1945 - DNA, 20 bp, Artificial Sequence
  Synthetic: rene_1943_MECOM
gatagtgccttcaaaatatc

SEQ ID NO: 1946 - DNA, 20 bp, Artificial Sequence
  Synthetic: rene_1944_MECOM
aaaggtaacgatctcaagtc

SEQ ID NO: 1947 - DNA, 20 bp, Artificial Sequence
  Synthetic: rene_1945_MECOM
acggaccctagcaaccttca

SEQ ID NO: 1948 - DNA, 20 bp, Artificial Sequence
  Synthetic: rene_1946_MECOM
acaggagaactagcaggtat

SEQ ID NO: 1949 - DNA, 20 bp, Artificial Sequence
  Synthetic: rene_1947_MEF2D
gcctgatgaagaaggcgtat

SEQ ID NO: 1950 - DNA, 20 bp, Artificial Sequence
  Synthetic: rene_1948_MEF2D
tgtggcaacgccgagtttac

SEQ ID NO: 1951 - DNA, 20 bp, Artificial Sequence
  Synthetic: rene_1949_MEF2D
ggctgttgccattggccaca

SEQ ID NO: 1952 - DNA, 20 bp, Artificial Sequence
  Synthetic: rene_1950_MEF2D
ctcagccagggcctcccctt

SEQ ID NO: 1953 - DNA, 20 bp, Artificial Sequence
  Synthetic: rene_1951_MEF2D
ctgcctgggaagtgatgact

SEQ ID NO: 1954 - DNA, 20 bp, Artificial Sequence
  Synthetic: rene_1952_MEF2D
ccatgcctgtcacggtgccc

SEQ ID NO: 1955 - DNA, 20 bp, Artificial Sequence
  Synthetic: rene_1953_MEF2D
accaagcggaagtttggcct

SEQ ID NO: 1956 - DNA, 20 bp, Artificial Sequence
  Synthetic: rene_1954_MEF2D
gttcacctggggggctgtcg

SEQ ID NO: 1957 - DNA, 20 bp, Artificial Sequence
  Synthetic: rene_1955_MLLT10
agatgaggctaaccaacagg

SEQ ID NO: 1958 - DNA, 20 bp, Artificial Sequence
  Synthetic: rene_1956_MLLT10
ctagaacagggtactcctag

SEQ ID NO: 1959 - DNA, 20 bp, Artificial Sequence
  Synthetic: rene_1957_MLLT10
tcctgagagtgagaggaaga

SEQ ID NO: 1960 - DNA, 20 bp, Artificial Sequence
  Synthetic: rene_1958_MLLT10
cctgataattctcttcctgt

SEQ ID NO: 1961 - DNA, 20 bp, Artificial Sequence
  Synthetic: rene_1959_MLLT10
cagtagccacagtattggac

SEQ ID NO: 1962 - DNA, 20 bp, Artificial Sequence
  Synthetic: rene_1960_MLLT10
caggaagtctctgcacacac

SEQ ID NO: 1963 - DNA, 20 bp, Artificial Sequence
  Synthetic: rene_1961_MLLT10
tgaccagcaacgacaaatac

SEQ ID NO: 1964 - DNA, 20 bp, Artificial Sequence
  Synthetic: rene_1962_MLLT10
atacaggaagagaattatca

SEQ ID NO: 1965 - DNA, 20 bp, Artificial Sequence
  Synthetic: rene_1963_MLLT6
ctggttggctgaggctcctt

SEQ ID NO: 1966 - DNA, 20 bp, Artificial Sequence
  Synthetic: rene_1964_MLLT6
cctccgcctcctcttcttcc

SEQ ID NO: 1967 - DNA, 20 bp, Artificial Sequence
  Synthetic: rene_1965_MLLT6
gcctcccttctacccacatc

SEQ ID NO: 1968 - DNA, 20 bp, Artificial Sequence
  Synthetic: rene_1966_MLLT6
ccctttgactccctgctgct

SEQ ID NO: 1969 - DNA, 20 bp, Artificial Sequence
  Synthetic: rene_1967_MLLT6
ccgccactgctgcctcaccc

SEQ ID NO: 1970 - DNA, 20 bp, Artificial Sequence
  Synthetic: rene_1968_MLLT6
gccgtcaggctcaggatctg

SEQ ID NO: 1971 - DNA, 20 bp, Artificial Sequence
  Synthetic: rene_1969_MLLT6
tgctggatctgctggatcat

SEQ ID NO: 1972 - DNA, 20 bp, Artificial Sequence
  Synthetic: rene_1970_MLLT6
cagtagccgcagtacttgac

SEQ ID NO: 1973 - DNA, 20 bp, Artificial Sequence
  Synthetic: rene_1971_MORF4L1
agagaccacagtatgctgaa

SEQ ID NO: 1974 - DNA, 20 bp, Artificial Sequence
  Synthetic: rene_1972_MORF4L1
tgttgcagaccagatgtctt

SEQ ID NO: 1975 - DNA, 20 bp, Artificial Sequence
  Synthetic: rene_1973_MORF4L1
ctgttcctgaaggagctccc

SEQ ID NO: 1976 - DNA, 20 bp, Artificial Sequence
  Synthetic: rene_1974_MORF4L1
ctggggcagcccctctcatc

SEQ ID NO: 1977 - DNA, 20 bp, Artificial Sequence
  Synthetic: rene_1975_MORF4L1
acttcaactctgttcatgaa

SEQ ID NO: 1978 - DNA, 20 bp, Artificial Sequence
  Synthetic: rene_1976_MORF4L1
cctggtaattaagtcccagt

SEQ ID NO: 1979 - DNA, 20 bp, Artificial Sequence
  Synthetic: rene_1977_MORF4L1
ttccaaccactgtaatgtat

SEQ ID NO: 1980 - DNA, 20 bp, Artificial Sequence
  Synthetic: rene_1978_MORF4L1
cagaaacagcgagaacttca

SEQ ID NO: 1981 - DNA, 20 bp, Artificial Sequence
  Synthetic: rene_1979_MPHOSPH8
ggaagaaaattgcagagaac

SEQ ID NO: 1982 - DNA, 20 bp, Artificial Sequence
  Synthetic: rene_1980_MPHOSPH8
aattacaaacccccacagaa

SEQ ID NO: 1983 - DNA, 20 bp, Artificial Sequence
  Synthetic: rene_1981_MPHOSPH8
aattaactccagaagaaaaa

SEQ ID NO: 1984 - DNA, 20 bp, Artificial Sequence
  Synthetic: rene_1982_MPHOSPH8
ctcctgcctctgacatcggt

SEQ ID NO: 1985 - DNA, 20 bp, Artificial Sequence
  Synthetic: rene_1983_MPHOSPH8
ggcatggacctgcagttgga

SEQ ID NO: 1986 - DNA, 20 bp, Artificial Sequence
  Synthetic: rene_1984_MPHOSPH8
cagtaatataatccccattt

SEQ ID NO: 1987 - DNA, 20 bp, Artificial Sequence
  Synthetic: rene_1985_MPHOSPH8
ctgcaacagatgcaattcca

SEQ ID NO: 1988 - DNA, 20 bp, Artificial Sequence
  Synthetic: rene_1986_MPHOSPH8
aagagtagcagaagagacaa

SEQ ID NO: 1989 - DNA, 20 bp, Artificial Sequence
  Synthetic: rene_1987_MSH6
ccagaagaatacgagttgaa

SEQ ID NO: 1990 - DNA, 20 bp, Artificial Sequence
  Synthetic: rene_1988_MSH6
ggacaagctcccttaatgaa

SEQ ID NO: 1991 - DNA, 20 bp, Artificial Sequence
  Synthetic: rene_1989_MSH6
gacttaaaaccatcagcaac

SEQ ID NO: 1992 - DNA, 20 bp, Artificial Sequence
  Synthetic: rene_1990_MSH6
cccaccttgtaacagatgac

SEQ ID NO: 1993 - DNA, 20 bp, Artificial Sequence
  Synthetic: rene_1991_MSH6
aggtagaagacacaaccacc

SEQ ID NO: 1994 - DNA, 20 bp, Artificial Sequence
  Synthetic: rene_1992_MSH6
ctgagtagcctctcaagatc

SEQ ID NO: 1995 - DNA, 20 bp, Artificial Sequence
  Synthetic: rene_1993_MSH6
atgataccaaacagtagggc

SEQ ID NO: 1996 - DNA, 20 bp, Artificial Sequence
  Synthetic: rene_1994_MSH6
tgatgagccctcagagccag

SEQ ID NO: 1997 - DNA, 20 bp, Artificial Sequence
  Synthetic: rene_1995_MSL3
gcagaataccacgatgactt

SEQ ID NO: 1998 - DNA, 20 bp, Artificial Sequence
  Synthetic: rene_1996_MSL3
actacagtcagaggaactgc

SEQ ID NO: 1999 - DNA, 20 bp, Artificial Sequence
  Synthetic: rene_1997_MSL3
agacagagtccacaccaggc

SEQ ID NO: 2000 - DNA, 20 bp, Artificial Sequence
  Synthetic: rene_1998_MSL3
aagggagaagaactaatgaa

SEQ ID NO: 2001 - DNA, 20 bp, Artificial Sequence
  Synthetic: rene_1999_MSL3
ctctatccatatgaacaagc

SEQ ID NO: 2002 - DNA, 20 bp, Artificial Sequence
  Synthetic: rene_2000_MSL3
atcggtatcacgaagcacat

SEQ ID NO: 2003 - DNA, 20 bp, Artificial Sequence
  Synthetic: rene_2001_MSL3
ctcctgttaatgtagtaaca

SEQ ID NO: 2004 - DNA, 20 bp, Artificial Sequence
  Synthetic: rene_2002_MSL3
gtctttcccaacaataacat

SEQ ID NO: 2005 - DNA, 20 bp, Artificial Sequence
  Synthetic: rene_2003_MTF2
gtggcacaggaggaacacga

SEQ ID NO: 2006 - DNA, 20 bp, Artificial Sequence
  Synthetic: rene_2004_MTF2
acgggtgcttccagtgcaaa

SEQ ID NO: 2007 - DNA, 20 bp, Artificial Sequence
  Synthetic: rene_2005_MTF2
attgggagcttctgaatact

SEQ ID NO: 2008 - DNA, 20 bp, Artificial Sequence
  Synthetic: rene_2006_MTF2
atctgaatcaatcacactgg

SEQ ID NO: 2009 - DNA, 20 bp, Artificial Sequence
  Synthetic: rene_2007_MTF2
aatgtccttccagagaaccc

SEQ ID NO: 2010 - DNA, 20 bp, Artificial Sequence
  Synthetic: rene_2008_MTF2
atgcctccagaacatgctca

SEQ ID NO: 2011 - DNA, 20 bp, Artificial Sequence
  Synthetic: rene_2009_MTF2
atagtgccaagataaaacaa

SEQ ID NO: 2012 - DNA, 20 bp, Artificial Sequence
  Synthetic: rene_2010_MTF2
gtgctgcaggtagaatagca

SEQ ID NO: 2013 - DNA, 20 bp, Artificial Sequence
  Synthetic: rene_2011_MTMR7
cctgtgcctttgagttcaat

SEQ ID NO: 2014 - DNA, 20 bp, Artificial Sequence
  Synthetic: rene_2012_MTMR7
ggagacactcgatctaccaa

SEQ ID NO: 2015 - DNA, 20 bp, Artificial Sequence
  Synthetic: rene_2013_MTMR7
gagtggaatgtataaccgct

SEQ ID NO: 2016 - DNA, 20 bp, Artificial Sequence
  Synthetic: rene_2014_MTMR7
attcaaccccatgctggata

SEQ ID NO: 2017 - DNA, 20 bp, Artificial Sequence
  Synthetic: rene_2015_MTMR7
gctgttacataggaagtttc

SEQ ID NO: 2018 - DNA, 20 bp, Artificial Sequence
  Synthetic: rene_2016_MTMR7
ctgtggggtctggagaactc

SEQ ID NO: 2019 - DNA, 20 bp, Artificial Sequence
  Synthetic: rene_2017_MTMR7
agtttatcgggatagagaac

SEQ ID NO: 2020 - DNA, 20 bp, Artificial Sequence
  Synthetic: rene_2018_MTMR7
ggtcaccatctagattgcca

SEQ ID NO: 2021 - DNA, 20 bp, Artificial Sequence
  Synthetic: rene_2019_MUM1
gcccgaaccgcgacttcaac

SEQ ID NO: 2022 - DNA, 20 bp, Artificial Sequence
  Synthetic: rene_2020_MUM1
ccatcggcagaggacatact

SEQ ID NO: 2023 - DNA, 20 bp, Artificial Sequence
  Synthetic: rene_2021_MUM1
gcagggcattctccaggctc

SEQ ID NO: 2024 - DNA, 20 bp, Artificial Sequence
  Synthetic: rene_2022_MUM1
agaggacgacacggagagag

SEQ ID NO: 2025 - DNA, 20 bp, Artificial Sequence
  Synthetic: rene_2023_MUM1
ctctagagagaggatttgca

SEQ ID NO: 2026 - DNA, 20 bp, Artificial Sequence
  Synthetic: rene_2024_MUM1
acagtgtctcttaaaagttt

SEQ ID NO: 2027 - DNA, 20 bp, Artificial Sequence
  Synthetic: rene_2025_MUM1
gagtcaagaaagctctgcag

SEQ ID NO: 2028 - DNA, 20 bp, Artificial Sequence
  Synthetic: rene_2026_MUM1
gggttcatgtgtccttcgat

SEQ ID NO: 2029 - DNA, 20 bp, Artificial Sequence
  Synthetic: rene_2027_MYH10
gatgaagaatgctggttccc

SEQ ID NO: 2030 - DNA, 20 bp, Artificial Sequence
  Synthetic: rene_2028_MYH10
gcagcaagtcttgccctcat

SEQ ID NO: 2031 - DNA, 20 bp, Artificial Sequence
  Synthetic: rene_2029_MYH10
gaagagaagaatatccttgc

SEQ ID NO: 2032 - DNA, 20 bp, Artificial Sequence
  Synthetic: rene_2030_MYH10
ggtgttctcctgctccagat

SEQ ID NO: 2033 - DNA, 20 bp, Artificial Sequence
  Synthetic: rene_2031_MYH10
gaatgatacaacgaacaaag

SEQ ID NO: 2034 - DNA, 20 bp, Artificial Sequence
  Synthetic: rene_2032_MYH10
gctgtccaatcagcttgagt

SEQ ID NO: 2035 - DNA, 20 bp, Artificial Sequence
  Synthetic: rene_2033_MYH10
tcctagaacaagaggaatac

SEQ ID NO: 2036 - DNA, 20 bp, Artificial Sequence
  Synthetic: rene_2034_MYH10
gtcctcgagaagcagaatct

SEQ ID NO: 2037 - DNA, 20 bp, Artificial Sequence
  Synthetic: rene_2035_NAMPT
gctacagaggagtctcttcc

SEQ ID NO: 2038 - DNA, 20 bp, Artificial Sequence
  Synthetic: rene_2036_NAMPT
attagagcaagtcctgctac

SEQ ID NO: 2039 - DNA, 20 bp, Artificial Sequence
  Synthetic: rene_2037_NAMPT
cttcctccagtgtaacaaaa

SEQ ID NO: 2040 - DNA, 20 bp, Artificial Sequence
  Synthetic: rene_2038_NAMPT
ggtaagaagtttcctgttac

SEQ ID NO: 2041 - DNA, 20 bp, Artificial Sequence
  Synthetic: rene_2039_NAMPT
atagtatcaagaagtacaca

SEQ ID NO: 2042 - DNA, 20 bp, Artificial Sequence
  Synthetic: rene_2040_NAMPT
ctgttactgagaactcaaag

SEQ ID NO: 2043 - DNA, 20 bp, Artificial Sequence
  Synthetic: rene_2041_NAMPT
tgggttgcagtacattctta

SEQ ID NO: 2044 - DNA, 20 bp, Artificial Sequence
  Synthetic: rene_2042_NAMPT
attaaagacatcatcttgga

SEQ ID NO: 2045 - DNA, 20 bp, Artificial Sequence
  Synthetic: rene_2043_NCOA1
cttgtacctgtccagtcact

SEQ ID NO: 2046 - DNA, 20 bp, Artificial Sequence
  Synthetic: rene_2044_NCOA1
gctgtgacacagtgaaacac

SEQ ID NO: 2047 - DNA, 20 bp, Artificial Sequence
  Synthetic: rene_2045_NCOA1
actgtgtcacagccaaaatc

SEQ ID NO: 2048 - DNA, 20 bp, Artificial Sequence
  Synthetic: rene_2046_NCOA1
ccatcactagagctgttgtc

SEQ ID NO: 2049 - DNA, 20 bp, Artificial Sequence
  Synthetic: rene_2047_NCOA1
gaagaactagctgagttact

SEQ ID NO: 2050 - DNA, 20 bp, Artificial Sequence
  Synthetic: rene_2048_NCOA1
ctgtcatgcctctgctcacc

SEQ ID NO: 2051 - DNA, 20 bp, Artificial Sequence
  Synthetic: rene_2049_NCOA1
cactcaagctgtcaatgtca

SEQ ID NO: 2052 - DNA, 20 bp, Artificial Sequence
  Synthetic: rene_2050_NCOA1
aatgaaatgattcaatctga

SEQ ID NO: 2053 - DNA, 20 bp, Artificial Sequence
  Synthetic: rene_2051_NCOA3
gcaggacccacaatgccaca

SEQ ID NO: 2054 - DNA, 20 bp, Artificial Sequence
  Synthetic: rene_2052_NCOA3
aaggaaacagtaagacagat

SEQ ID NO: 2055 - DNA, 20 bp, Artificial Sequence
  Synthetic: rene_2053_NCOA3
ctggaggacttgagccaaca

SEQ ID NO: 2056 - DNA, 20 bp, Artificial Sequence
  Synthetic: rene_2054_NCOA3
ccagcagcagtttgcccacc

SEQ ID NO: 2057 - DNA, 20 bp, Artificial Sequence
  Synthetic: rene_2055_NCOA3
gtaagccccagtctcctgag

SEQ ID NO: 2058 - DNA, 20 bp, Artificial Sequence
  Synthetic: rene_2056_NCOA3
gactaaaaaatctctgaata

SEQ ID NO: 2059 - DNA, 20 bp, Artificial Sequence
  Synthetic: rene_2057_NCOA3
ctggacaaatgagacccaaa

SEQ ID NO: 2060 - DNA, 20 bp, Artificial Sequence
  Synthetic: rene_2058_NCOA3
gggcaagaccaggactccca

SEQ ID NO: 2061 - DNA, 20 bp, Artificial Sequence
  Synthetic: rene_2059_NDFIP1
attagagagagaccaaatcc

SEQ ID NO: 2062 - DNA, 20 bp, Artificial Sequence
  Synthetic: rene_2060_NDFIP1
cctgaccacttcagctgcag

SEQ ID NO: 2063 - DNA, 20 bp, Artificial Sequence
  Synthetic: rene_2061_NDFIP1
actacaaggatgagtctggg

SEQ ID NO: 2064 - DNA, 20 bp, Artificial Sequence
  Synthetic: rene_2062_NDFIP1
caaagcccccatcttacaat

SEQ ID NO: 2065 - DNA, 20 bp, Artificial Sequence
  Synthetic: rene_2063_NDFIP1
ctatcctcagctggtcagca

SEQ ID NO: 2066 - DNA, 20 bp, Artificial Sequence
  Synthetic: rene_2064_NDFIP1
gtctctctctaattaaatgg

SEQ ID NO: 2067 - DNA, 20 bp, Artificial Sequence
  Synthetic: rene_2065_NDFIP1
atgatgctgaccagctgagg

SEQ ID NO: 2068 - DNA, 20 bp, Artificial Sequence
  Synthetic: rene_2066_NDFIP1
gaaacccagactcatccttg

SEQ ID NO: 2069 - DNA, 20 bp, Artificial Sequence
  Synthetic: rene_2067_NDUFA5
accatagccagcttctcatt

SEQ ID NO: 2070 - DNA, 20 bp, Artificial Sequence
  Synthetic: rene_2068_NDUFA5
ctcaagaacatcaagaatct

SEQ ID NO: 2071 - DNA, 20 bp, Artificial Sequence
  Synthetic: rene_2069_NDUFA5
gggatttcctcaagaacatc

SEQ ID NO: 2072 - DNA, 20 bp, Artificial Sequence
  Synthetic: rene_2070_NDUFA5
cactgatcggcaggaggctc

SEQ ID NO: 2073 - DNA, 20 bp, Artificial Sequence
  Synthetic: rene_2071_NDUFA5
ttgccagatttagttcatgt

SEQ ID NO: 2074 - DNA, 20 bp, Artificial Sequence
  Synthetic: rene_2072_NDUFA5
taatctgttctgtatacttt

SEQ ID NO: 2075 - DNA, 20 bp, Artificial Sequence
  Synthetic: rene_2073_NDUFA5
cattccctcatttttcttgc

SEQ ID NO: 2076 - DNA, 20 bp, Artificial Sequence
  Synthetic: rene_2074_NDUFA5
tatatgctgcatttttaggg

SEQ ID NO: 2077 - DNA, 20 bp, Artificial Sequence
  Synthetic: rene_2075_NFATC1
gcttccatctcccagacatg

SEQ ID NO: 2078 - DNA, 20 bp, Artificial Sequence
  Synthetic: rene_2076_NFATC1
gagctagggaggacgtcttc

SEQ ID NO: 2079 - DNA, 20 bp, Artificial Sequence
  Synthetic: rene_2077_NFATC1
acctaccttcccgccaacgg

SEQ ID NO: 2080 - DNA, 20 bp, Artificial Sequence
  Synthetic: rene_2078_NFATC1
ggaatcagaggataaccagc

SEQ ID NO: 2081 - DNA, 20 bp, Artificial Sequence
  Synthetic: rene_2079_NFATC1
tacgtctgcaacgggaagag

SEQ ID NO: 2082 - DNA, 20 bp, Artificial Sequence
  Synthetic: rene_2080_NFATC1
tcttcccgttgcagacgtag

SEQ ID NO: 2083 - DNA, 20 bp, Artificial Sequence
  Synthetic: rene_2081_NFATC1
gcccctattcctgtaacggt

SEQ ID NO: 2084 - DNA, 20 bp, Artificial Sequence
  Synthetic: rene_2082_NFATC1
tcctctcccgaagaccgcag

SEQ ID NO: 2085 - DNA, 20 bp, Artificial Sequence
  Synthetic: rene_2083_NR4A2
gcatggacctcaccaacact

SEQ ID NO: 2086 - DNA, 20 bp, Artificial Sequence
  Synthetic: rene_2084_NR4A2
ctacaagccctcctcgcccc

SEQ ID NO: 2087 - DNA, 20 bp, Artificial Sequence
  Synthetic: rene_2085_NR4A2
agtgttggtgaggtccatgc

SEQ ID NO: 2088 - DNA, 20 bp, Artificial Sequence
  Synthetic: rene_2086_NR4A2
ccctcgaaaccgaagagccc

SEQ ID NO: 2089 - DNA, 20 bp, Artificial Sequence
  Synthetic: rene_2087_NR4A2
gagggcaaacgacctctccg

SEQ ID NO: 2090 - DNA, 20 bp, Artificial Sequence
  Synthetic: rene_2088_NR4A2
gtacaagcaaggtggcttga

SEQ ID NO: 2091 - DNA, 20 bp, Artificial Sequence
  Synthetic: rene_2089_NR4A2
agaagtgcctggctgttggg

SEQ ID NO: 2092 - DNA, 20 bp, Artificial Sequence
  Synthetic: rene_2090_NR4A2
tggacaactacagcacaggc

SEQ ID NO: 2093 - DNA, 20 bp, Artificial Sequence
  Synthetic: rene_2091_NRIP1
cctggataacttcactcaat

SEQ ID NO: 2094 - DNA, 20 bp, Artificial Sequence
  Synthetic: rene_2092_NRIP1
ggggaagaaggaatgatacc

SEQ ID NO: 2095 - DNA, 20 bp, Artificial Sequence
  Synthetic: rene_2093_NRIP1
ctgtcagccacagagttact

SEQ ID NO: 2096 - DNA, 20 bp, Artificial Sequence
  Synthetic: rene_2094_NRIP1
acttacctagaaggattact

SEQ ID NO: 2097 - DNA, 20 bp, Artificial Sequence
  Synthetic: rene_2095_NRIP1
gtgccagtaagctgttacaa

SEQ ID NO: 2098 - DNA, 20 bp, Artificial Sequence
  Synthetic: rene_2096_NRIP1
aggaaagtagtacacctaca

SEQ ID NO: 2099 - DNA, 20 bp, Artificial Sequence
  Synthetic: rene_2097_NRIP1
agactgagtactgcagacat

SEQ ID NO: 2100 - DNA, 20 bp, Artificial Sequence
  Synthetic: rene_2098_NRIP1
gcacaatgtggaatgcagtc

SEQ ID NO: 2101 - DNA, 20 bp, Artificial Sequence
  Synthetic: rene_2099_NSD1
ccatgaagagtgtgtccaga

SEQ ID NO: 2102 - DNA, 20 bp, Artificial Sequence
  Synthetic: rene_2100_NSD1
actaggagacacaaacatta

SEQ ID NO: 2103 - DNA, 20 bp, Artificial Sequence
  Synthetic: rene_2101_NSD1
ccaggatcagattgcttaac

SEQ ID NO: 2104 - DNA, 20 bp, Artificial Sequence
  Synthetic: rene_2102_NSD1
gatgcccctgaagacaagga

SEQ ID NO: 2105 - DNA, 20 bp, Artificial Sequence
  Synthetic: rene_2103_NSD1
gatagaacagagaacatgtt

SEQ ID NO: 2106 - DNA, 20 bp, Artificial Sequence
  Synthetic: rene_2104_NSD1
actgcaccgtgtctactctc

SEQ ID NO: 2107 - DNA, 20 bp, Artificial Sequence
  Synthetic: rene_2105_NSD1
gagagagagcatcatttgta

SEQ ID NO: 2108 - DNA, 20 bp, Artificial Sequence
  Synthetic: rene_2106_NSD1
gagggccccttggctcagtc

SEQ ID NO: 2109 - DNA, 20 bp, Artificial Sequence
  Synthetic: rene_2107_NSD2
gatgagacagatacttcagt

SEQ ID NO: 2110 - DNA, 20 bp, Artificial Sequence
  Synthetic: rene_2108_NSD2
ccatgaggcttgtgtgaaaa

SEQ ID NO: 2111 - DNA, 20 bp, Artificial Sequence
  Synthetic: rene_2109_NSD2
gtgtgtaaagagagcaagac

SEQ ID NO: 2112 - DNA, 20 bp, Artificial Sequence
  Synthetic: rene_2110_NSD2
tctgaaggacttgagatctt

SEQ ID NO: 2113 - DNA, 20 bp, Artificial Sequence
  Synthetic: rene_2111_NSD2
acacaagcctcatggtaaaa

SEQ ID NO: 2114 - DNA, 20 bp, Artificial Sequence
  Synthetic: rene_2112_NSD2
gcatcaagcagagtcccctt

SEQ ID NO: 2115 - DNA, 20 bp, Artificial Sequence
  Synthetic: rene_2113_NSD2
acagaagaccaaaaactggg

SEQ ID NO: 2116 - DNA, 20 bp, Artificial Sequence
  Synthetic: rene_2114_NSD2
gcagtcactcctcgctcaga

SEQ ID NO: 2117 - DNA, 20 bp, Artificial Sequence
  Synthetic: rene_2115_NSD3
ccatcccctgtagcattctg

SEQ ID NO: 2118 - DNA, 20 bp, Artificial Sequence
  Synthetic: rene_2116_NSD3
ccacaagcaccaacagaaca

SEQ ID NO: 2119 - DNA, 20 bp, Artificial Sequence
  Synthetic: rene_2117_NSD3
ccatgatcccttgcatgaaa

SEQ ID NO: 2120 - DNA, 20 bp, Artificial Sequence
  Synthetic: rene_2118_NSD3
gtgtaaagtgtctggtaaag

SEQ ID NO: 2121 - DNA, 20 bp, Artificial Sequence
  Synthetic: rene_2119_NSD3
gaatgattactacagatgag

SEQ ID NO: 2122 - DNA, 20 bp, Artificial Sequence
  Synthetic: rene_2120_NSD3
agtacccagctacaacagaa

SEQ ID NO: 2123 - DNA, 20 bp, Artificial Sequence
  Synthetic: rene_2121_NSD3
gtgtgctcacttgcctgtac

SEQ ID NO: 2124 - DNA, 20 bp, Artificial Sequence
  Synthetic: rene_2122_NSD3
gtatgaacctcaagctgggg

SEQ ID NO: 2125 - DNA, 20 bp, Artificial Sequence
  Synthetic: rene_2123_P2RX4
acatcatccccactatgatc

SEQ ID NO: 2126 - DNA, 20 bp, Artificial Sequence
  Synthetic: rene_2124_P2RX4
ggataccagatgttgttctt

SEQ ID NO: 2127 - DNA, 20 bp, Artificial Sequence
  Synthetic: rene_2125_P2RX4
gcatcataaatgcacgactt

SEQ ID NO: 2128 - DNA, 20 bp, Artificial Sequence
  Synthetic: rene_2126_P2RX4
aaggctgcagaaaacttcac

SEQ ID NO: 2129 - DNA, 20 bp, Artificial Sequence
  Synthetic: rene_2127_P2RX4
gcagaagtggaaatggagtc

SEQ ID NO: 2130 - DNA, 20 bp, Artificial Sequence
  Synthetic: rene_2128_P2RX4
gttaagaacaacatctggta

SEQ ID NO: 2131 - DNA, 20 bp, Artificial Sequence
  Synthetic: rene_2129_P2RX4
gaagtgttggtcacagccac

SEQ ID NO: 2132 - DNA, 20 bp, Artificial Sequence
  Synthetic: rene_2130_P2RX4
ctggtagcccttttcccaca

SEQ ID NO: 2133 - DNA, 20 bp, Artificial Sequence
  Synthetic: rene_2131_PAK1
gctgaacctctcttctccac

SEQ ID NO: 2134 - DNA, 20 bp, Artificial Sequence
  Synthetic: rene_2132_PAK1
cctcatgaccaggatctcat

SEQ ID NO: 2135 - DNA, 20 bp, Artificial Sequence
  Synthetic: rene_2133_PAK1
gaggcagaggtttagaacca

SEQ ID NO: 2136 - DNA, 20 bp, Artificial Sequence
  Synthetic: rene_2134_PAK1
gtgtcacaacctctggtgcc

SEQ ID NO: 2137 - DNA, 20 bp, Artificial Sequence
  Synthetic: rene_2135_PAK1
acctactgaaaataacacca

SEQ ID NO: 2138 - DNA, 20 bp, Artificial Sequence
  Synthetic: rene_2136_PAK1
agaagatgaggatgatgatg

SEQ ID NO: 2139 - DNA, 20 bp, Artificial Sequence
  Synthetic: rene_2137_PAK1
gaaccatggtttagggttcc

SEQ ID NO: 2140 - DNA, 20 bp, Artificial Sequence
  Synthetic: rene_2138_PAK1
attgaggtatggaggctccc

SEQ ID NO: 2141 - DNA, 20 bp, Artificial Sequence
  Synthetic: rene_2139_PAK2
actgctactgacgttgcact

SEQ ID NO: 2142 - DNA, 20 bp, Artificial Sequence
  Synthetic: rene_2140_PAK2
ggacatccagcacagcctga

SEQ ID NO: 2143 - DNA, 20 bp, Artificial Sequence
  Synthetic: rene_2141_PAK2
catgctaatcaagtgatcca

SEQ ID NO: 2144 - DNA, 20 bp, Artificial Sequence
  Synthetic: rene_2142_PAK2
attgaggtatggaggctctc

SEQ ID NO: 2145 - DNA, 20 bp, Artificial Sequence
  Synthetic: rene_2143_PAK2
ttagggtcacctatgctcac

SEQ ID NO: 2146 - DNA, 20 bp, Artificial Sequence
  Synthetic: rene_2144_PAK2
tgttaccacatcagtgagtg

SEQ ID NO: 2147 - DNA, 20 bp, Artificial Sequence
  Synthetic: rene_2145_PAK2
cagaaacagccaaagaagga

SEQ ID NO: 2148 - DNA, 20 bp, Artificial Sequence
  Synthetic: rene_2146_PAK2
ggaatggaaggatctgttaa

SEQ ID NO: 2149 - DNA, 20 bp, Artificial Sequence
  Synthetic: rene_2147_PAK3
gagtcaccacctcaggtgcc

SEQ ID NO: 2150 - DNA, 20 bp, Artificial Sequence
  Synthetic: rene_2148_PAK3
agtgcaggaaatccaaagct

SEQ ID NO: 2151 - DNA, 20 bp, Artificial Sequence
  Synthetic: rene_2149_PAK3
acagagccatccatcccgag

SEQ ID NO: 2152 - DNA, 20 bp, Artificial Sequence
  Synthetic: rene_2150_PAK3
cctcatgaccagaatttcat

SEQ ID NO: 2153 - DNA, 20 bp, Artificial Sequence
  Synthetic: rene_2151_PAK3
gagtaatcgtgcccattgct

SEQ ID NO: 2154 - DNA, 20 bp, Artificial Sequence
  Synthetic: rene_2152_PAK3
tcccctcctcctgggaagat

SEQ ID NO: 2155 - DNA, 20 bp, Artificial Sequence
  Synthetic: rene_2153_PAK3
aaattagccaagcctctctc

SEQ ID NO: 2156 - DNA, 20 bp, Artificial Sequence
  Synthetic: rene_2154_PAK3
ggtccccaacactcacaatg

SEQ ID NO: 2157 - DNA, 20 bp, Artificial Sequence
  Synthetic: rene_2155_PBRM1
ggagaagccatgtcatcatc

SEQ ID NO: 2158 - DNA, 20 bp, Artificial Sequence
  Synthetic: rene_2156_PBRM1
gcagaataccgtgattcaca

SEQ ID NO: 2159 - DNA, 20 bp, Artificial Sequence
  Synthetic: rene_2157_PBRM1
gcttctagcaactggatctt

SEQ ID NO: 2160 - DNA, 20 bp, Artificial Sequence
  Synthetic: rene_2158_PBRM1
agagtgactattacaacaaa

SEQ ID NO: 2161 - DNA, 20 bp, Artificial Sequence
  Synthetic: rene_2159_PBRM1
gcactaccagtatcagaggt

SEQ ID NO: 2162 - DNA, 20 bp, Artificial Sequence
  Synthetic: rene_2160_PBRM1
ctaacaaaccaccccttaca

SEQ ID NO: 2163 - DNA, 20 bp, Artificial Sequence
  Synthetic: rene_2161_PBRM1
ataatgcctgtacatacaat

SEQ ID NO: 2164 - DNA, 20 bp, Artificial Sequence
  Synthetic: rene_2162_PBRM1
ggacatgagagtcctcatct

SEQ ID NO: 2165 - DNA, 20 bp, Artificial Sequence
  Synthetic: rene_2163_PBX3
ctcacacctcagcaacccct

SEQ ID NO: 2166 - DNA, 20 bp, Artificial Sequence
  Synthetic: rene_2164_PBX3
gatggatgatgcccaccatt

SEQ ID NO: 2167 - DNA, 20 bp, Artificial Sequence
  Synthetic: rene_2165_PBX3
gctctgtaatctgagtgttc

SEQ ID NO: 2168 - DNA, 20 bp, Artificial Sequence
  Synthetic: rene_2166_PBX3
gcaacaaacgaatcaggtac

SEQ ID NO: 2169 - DNA, 20 bp, Artificial Sequence
  Synthetic: rene_2167_PBX3
ggaggttaaaagaaccagaa

SEQ ID NO: 2170 - DNA, 20 bp, Artificial Sequence
  Synthetic: rene_2168_PBX3
aggaagaagccaacctctat

SEQ ID NO: 2171 - DNA, 20 bp, Artificial Sequence
  Synthetic: rene_2169_PBX3
ctccaaggccatcactgtag

SEQ ID NO: 2172 - DNA, 20 bp, Artificial Sequence
  Synthetic: rene_2170_PBX3
gttccattcagatgcagctc

SEQ ID NO: 2173 - DNA, 20 bp, Artificial Sequence
  Synthetic: rene_2171_PDCD1
gcacgaagctctccgatgtg

SEQ ID NO: 2174 - DNA, 20 bp, Artificial Sequence
  Synthetic: rene_2172_PDCD1
cagtggcgagagaagacccc

SEQ ID NO: 2175 - DNA, 20 bp, Artificial Sequence
  Synthetic: rene_2173_PDCD1
ctagcggaatgggcacctca

SEQ ID NO: 2176 - DNA, 20 bp, Artificial Sequence
  Synthetic: rene_2174_PDCD1
gaactggccggctggcctgg

SEQ ID NO: 2177 - DNA, 20 bp, Artificial Sequence
  Synthetic: rene_2175_PDCD1
atctgcgccttgggggccag

SEQ ID NO: 2178 - DNA, 20 bp, Artificial Sequence
  Synthetic: rene_2176_PDCD1LG2
atagccacagtgatagccct

SEQ ID NO: 2179 - DNA, 20 bp, Artificial Sequence
  Synthetic: rene_2177_PDCD1LG2
gccaggatacttctgccaga

SEQ ID NO: 2180 - DNA, 20 bp, Artificial Sequence
  Synthetic: rene_2178_PDCD1LG2
ggcgcagaacactggtgacc

SEQ ID NO: 2181 - DNA, 20 bp, Artificial Sequence
  Synthetic: rene_2179_PDCD1LG2
atccccttctgcatcattgc

SEQ ID NO: 2182 - DNA, 20 bp, Artificial Sequence
  Synthetic: rene_2180_PDCD1LG2
ctggaggagcagctgcccct

SEQ ID NO: 2183 - DNA, 20 bp, Artificial Sequence
  Synthetic: rene_2181_PDCD1LG2
caaaaggtggaaaatgatac

SEQ ID NO: 2184 - DNA, 20 bp, Artificial Sequence
  Synthetic: rene_2182_PDCD1LG2
agagtcaggtacttgtagtc

SEQ ID NO: 2185 - DNA, 20 bp, Artificial Sequence
  Synthetic: rene_2183_PDCD1LG2
ttagggctatcactgtggct

SEQ ID NO: 2186 - DNA, 20 bp, Artificial Sequence
  Synthetic: rene_2184_PDPK1
gaggcagcgataccagagcc

SEQ ID NO: 2187 - DNA, 20 bp, Artificial Sequence
  Synthetic: rene_2185_PDPK1
agaggtccgtatccttccat

SEQ ID NO: 2188 - DNA, 20 bp, Artificial Sequence
  Synthetic: rene_2186_PDPK1
gctgcatgcaggtgtcttcg

SEQ ID NO: 2189 - DNA, 20 bp, Artificial Sequence
  Synthetic: rene_2187_PDPK1
gatgccacaaagcggttagg

SEQ ID NO: 2190 - DNA, 20 bp, Artificial Sequence
  Synthetic: rene_2188_PDPK1
tccagagctgctcacggaga

SEQ ID NO: 2191 - DNA, 20 bp, Artificial Sequence
  Synthetic: rene_2189_PDPK1
cgccagcctgcttctccaac

SEQ ID NO: 2192 - DNA, 20 bp, Artificial Sequence
  Synthetic: rene_2190_PDPK1
ctcacagcctaaccgctttg

SEQ ID NO: 2193 - DNA, 20 bp, Artificial Sequence
  Synthetic: rene_2191_PDPK1
cgaagatgagaagaggttgt

SEQ ID NO: 2194 - DNA, 20 bp, Artificial Sequence
  Synthetic: rene_2192_PENK
agagaaggcagtttaccttc

SEQ ID NO: 2195 - DNA, 20 bp, Artificial Sequence
  Synthetic: rene_2193_PENK
ccttcacattccattacgca

SEQ ID NO: 2196 - DNA, 20 bp, Artificial Sequence
  Synthetic: rene_2194_PENK
tggtagtccatccaccactc

SEQ ID NO: 2197 - DNA, 20 bp, Artificial Sequence
  Synthetic: rene_2195_PENK
atgaagcccccatacctttt

SEQ ID NO: 2198 - DNA, 20 bp, Artificial Sequence
  Synthetic: rene_2196_PENK
ttcatgaagcctccatacct

SEQ ID NO: 2199 - DNA, 20 bp, Artificial Sequence
  Synthetic: rene_2197_PENK
tctgagggtgctggtgccat

SEQ ID NO: 2200 - DNA, 20 bp, Artificial Sequence
  Synthetic: rene_2198_PENK
gcaggtctgaggaattggcc

SEQ ID NO: 2201 - DNA, 20 bp, Artificial Sequence
  Synthetic: rene_2199_PENK
ggaaacctgcaaggagctcc

SEQ ID NO: 2202 - DNA, 20 bp, Artificial Sequence
  Synthetic: rene_2200_PHF1
agacacccccaaaggagaac

SEQ ID NO: 2203 - DNA, 20 bp, Artificial Sequence
  Synthetic: rene_2201_PHF1
cccttctgcctcctcctcag

SEQ ID NO: 2204 - DNA, 20 bp, Artificial Sequence
  Synthetic: rene_2202_PHF1
cttccttccacccttctgcc

SEQ ID NO: 2205 - DNA, 20 bp, Artificial Sequence
  Synthetic: rene_2203_PHF1
cccacagacatccctaaaag

SEQ ID NO: 2206 - DNA, 20 bp, Artificial Sequence
  Synthetic: rene_2204_PHF1
gggatgtctgtggggaaacc

SEQ ID NO: 2207 - DNA, 20 bp, Artificial Sequence
  Synthetic: rene_2205_PHF1
atttcagggagagagattaa

SEQ ID NO: 2208 - DNA, 20 bp, Artificial Sequence
  Synthetic: rene_2206_PHF1
agggagagagattaagaaga

SEQ ID NO: 2209 - DNA, 20 bp, Artificial Sequence
  Synthetic: rene_2207_PHF1
ctcttcttaatctctctccc

SEQ ID NO: 2210 - DNA, 20 bp, Artificial Sequence
  Synthetic: rene_2208_PHF10
gttactatccagcagaaaac

SEQ ID NO: 2211 - DNA, 20 bp, Artificial Sequence
  Synthetic: rene_2209_PHF10
aaggaggtcacacccaaata

SEQ ID NO: 2212 - DNA, 20 bp, Artificial Sequence
  Synthetic: rene_2210_PHF10
gctctctcaggtagagtttc

SEQ ID NO: 2213 - DNA, 20 bp, Artificial Sequence
  Synthetic: rene_2211_PHF10
tcatcacctcgaccatcttc

SEQ ID NO: 2214 - DNA, 20 bp, Artificial Sequence
  Synthetic: rene_2212_PHF10
cagggaagacagaaatcaaa

SEQ ID NO: 2215 - DNA, 20 bp, Artificial Sequence
  Synthetic: rene_2213_PHF10
acaactcctagaactatctc

SEQ ID NO: 2216 - DNA, 20 bp, Artificial Sequence
  Synthetic: rene_2214_PHF10
ttgtagaataacagaatact

SEQ ID NO: 2217 - DNA, 20 bp, Artificial Sequence
  Synthetic: rene_2215_PHF10
atgataaaagaatatccagc

SEQ ID NO: 2218 - DNA, 20 bp, Artificial Sequence
  Synthetic: rene_2216_PHF11
actgtagattgttcgaagac

SEQ ID NO: 2219 - DNA, 20 bp, Artificial Sequence
  Synthetic: rene_2217_PHF11
atgtggaatcagtaaagaaa

SEQ ID NO: 2220 - DNA, 20 bp, Artificial Sequence
  Synthetic: rene_2218_PHF11
agtcctgaagtagctcaatc

SEQ ID NO: 2221 - DNA, 20 bp, Artificial Sequence
  Synthetic: rene_2219_PHF11
tgtgccaagaaggacgacgc

SEQ ID NO: 2222 - DNA, 20 bp, Artificial Sequence
  Synthetic: rene_2220_PHF11
aggagtgaaaagaaaaagag

SEQ ID NO: 2223 - DNA, 20 bp, Artificial Sequence
  Synthetic: rene_2221_PHF11
ccagcaacatgctcaattcc

SEQ ID NO: 2224 - DNA, 20 bp, Artificial Sequence
  Synthetic: rene_2222_PHF11
caaatgtgtcttcgaacaat

SEQ ID NO: 2225 - DNA, 20 bp, Artificial Sequence
  Synthetic: rene_2223_PHF11
ctgattccacatcaaaactt

SEQ ID NO: 2226 - DNA, 20 bp, Artificial Sequence
  Synthetic: rene_2224_PHF12
agttgcccaatgaactgact

SEQ ID NO: 2227 - DNA, 20 bp, Artificial Sequence
  Synthetic: rene_2225_PHF12
tgaagagagcaggaacaaga

SEQ ID NO: 2228 - DNA, 20 bp, Artificial Sequence
  Synthetic: rene_2226_PHF12
gtcgcaaactcagtgatgct

SEQ ID NO: 2229 - DNA, 20 bp, Artificial Sequence
  Synthetic: rene_2227_PHF12
ccctcccgggtccaaccttc

SEQ ID NO: 2230 - DNA, 20 bp, Artificial Sequence
  Synthetic: rene_2228_PHF12
cctgtggtttcctcctttct

SEQ ID NO: 2231 - DNA, 20 bp, Artificial Sequence
  Synthetic: rene_2229_PHF12
gttcctgtcccaagcctgcc

SEQ ID NO: 2232 - DNA, 20 bp, Artificial Sequence
  Synthetic: rene_2230_PHF12
cagggaggtggtgactgagc

SEQ ID NO: 2233 - DNA, 20 bp, Artificial Sequence
  Synthetic: rene_2231_PHF12
ggggtgagcccagtggcctt

SEQ ID NO: 2234 - DNA, 20 bp, Artificial Sequence
  Synthetic: rene_2232_PHF13
gcacaggacaggtgaatcca

SEQ ID NO: 2235 - DNA, 20 bp, Artificial Sequence
  Synthetic: rene_2233_PHF13
gcagacaaacacttctggaa

SEQ ID NO: 2236 - DNA, 20 bp, Artificial Sequence
  Synthetic: rene_2234_PHF13
cctgccggacgatagtccgt

SEQ ID NO: 2237 - DNA, 20 bp, Artificial Sequence
  Synthetic: rene_2235_PHF13
gccacctgcagcctactctc

SEQ ID NO: 2238 - DNA, 20 bp, Artificial Sequence
  Synthetic: rene_2236_PHF13
tgtccagcaggaagttactg

SEQ ID NO: 2239 - DNA, 20 bp, Artificial Sequence
  Synthetic: rene_2237_PHF13
acatccgccgttccaaccgc

SEQ ID NO: 2240 - DNA, 20 bp, Artificial Sequence
  Synthetic: rene_2238_PHF13
aggagcagccccagccctgc

SEQ ID NO: 2241 - DNA, 20 bp, Artificial Sequence
  Synthetic: rene_2239_PHF13
ccaggcgcatcactgtccct

SEQ ID NO: 2242 - DNA, 20 bp, Artificial Sequence
  Synthetic: rene_2240_PHF14
gaagaagaactgaatgaaga

SEQ ID NO: 2243 - DNA, 20 bp, Artificial Sequence
  Synthetic: rene_2241_PHF14
caggtatcacacaataaaag

SEQ ID NO: 2244 - DNA, 20 bp, Artificial Sequence
  Synthetic: rene_2242_PHF14
tccttccatccacactagaa

SEQ ID NO: 2245 - DNA, 20 bp, Artificial Sequence
  Synthetic: rene_2243_PHF14
attgtctccagttcccttgc

SEQ ID NO: 2246 - DNA, 20 bp, Artificial Sequence
  Synthetic: rene_2244_PHF14
cgagcacccaaggagagaaa

SEQ ID NO: 2247 - DNA, 20 bp, Artificial Sequence
  Synthetic: rene_2245_PHF14
caataggactgtagagccaa

SEQ ID NO: 2248 - DNA, 20 bp, Artificial Sequence
  Synthetic: rene_2246_PHF14
catgtgacctgtgctcaaaa

SEQ ID NO: 2249 - DNA, 20 bp, Artificial Sequence
  Synthetic: rene_2247_PHF14
cgaatagctgaagcactgct

SEQ ID NO: 2250 - DNA, 20 bp, Artificial Sequence
  Synthetic: rene_2248_PHF19
agagcatcagtgaagatgac

SEQ ID NO: 2251 - DNA, 20 bp, Artificial Sequence
  Synthetic: rene_2249_PHF19
atccagcgtgaagtcaaata

SEQ ID NO: 2252 - DNA, 20 bp, Artificial Sequence
  Synthetic: rene_2250_PHF19
gagacagatagcgcctctgc

SEQ ID NO: 2253 - DNA, 20 bp, Artificial Sequence
  Synthetic: rene_2251_PHF19
acttcacgctggatgaaatt

SEQ ID NO: 2254 - DNA, 20 bp, Artificial Sequence
  Synthetic: rene_2252_PHF19
gcagcagtcctttgtcaggc

SEQ ID NO: 2255 - DNA, 20 bp, Artificial Sequence
  Synthetic: rene_2253_PHF19
cctgttcttctgctccgtgt

SEQ ID NO: 2256 - DNA, 20 bp, Artificial Sequence
  Synthetic: rene_2254_PHF19
cccgcaggggcatgtatgcc

SEQ ID NO: 2257 - DNA, 20 bp, Artificial Sequence
  Synthetic: rene_2255_PHF19
gaattatcttcgaaagtcac

SEQ ID NO: 2258 - DNA, 20 bp, Artificial Sequence
  Synthetic: rene_2256_PHF2
cctgcactcttgccactgcc

SEQ ID NO: 2259 - DNA, 20 bp, Artificial Sequence
  Synthetic: rene_2257_PHF2
ccatcaggaggaagaaaaac

SEQ ID NO: 2260 - DNA, 20 bp, Artificial Sequence
  Synthetic: rene_2258_PHF2
cccctcactggagtcagatg

SEQ ID NO: 2261 - DNA, 20 bp, Artificial Sequence
  Synthetic: rene_2259_PHF2
cagctagaggcgacttctct

SEQ ID NO: 2262 - DNA, 20 bp, Artificial Sequence
  Synthetic: rene_2260_PHF2
ggcttggccagcaatgcatc

SEQ ID NO: 2263 - DNA, 20 bp, Artificial Sequence
  Synthetic: rene_2261_PHF2
gatggcttgggcatcttcac

SEQ ID NO: 2264 - DNA, 20 bp, Artificial Sequence
  Synthetic: rene_2262_PHF2
aacctcctttccacttcata

SEQ ID NO: 2265 - DNA, 20 bp, Artificial Sequence
  Synthetic: rene_2263_PHF2
ctccacagcctgagtgtgga

SEQ ID NO: 2266 - DNA, 20 bp, Artificial Sequence
  Synthetic: rene_2264_PHF20
ggcctagcattacccacaat

SEQ ID NO: 2267 - DNA, 20 bp, Artificial Sequence
  Synthetic: rene_2265_PHF20
gatgcaaagttgtggactgt

SEQ ID NO: 2268 - DNA, 20 bp, Artificial Sequence
  Synthetic: rene_2266_PHF20
gttgatacggatcctttgca

SEQ ID NO: 2269 - DNA, 20 bp, Artificial Sequence
  Synthetic: rene_2267_PHF20
ctcctggacctcacagatgc

SEQ ID NO: 2270 - DNA, 20 bp, Artificial Sequence
  Synthetic: rene_2268_PHF20
cccggccaaagtcactgctg

SEQ ID NO: 2271 - DNA, 20 bp, Artificial Sequence
  Synthetic: rene_2269_PHF20
acagtctgaactactccatc

SEQ ID NO: 2272 - DNA, 20 bp, Artificial Sequence
  Synthetic: rene_2270_PHF20
catggaatggagaagtcact

SEQ ID NO: 2273 - DNA, 20 bp, Artificial Sequence
  Synthetic: rene_2271_PHF20
atgggacttcacatcctttt

SEQ ID NO: 2274 - DNA, 20 bp, Artificial Sequence
  Synthetic: rene_2272_PHF20L1
gaggcactggactacttaca

SEQ ID NO: 2275 - DNA, 20 bp, Artificial Sequence
  Synthetic: rene_2273_PHF20L1
acctaaacctcaaagtcaga

SEQ ID NO: 2276 - DNA, 20 bp, Artificial Sequence
  Synthetic: rene_2274_PHF20L1
gaagaagaacaagaattcca

SEQ ID NO: 2277 - DNA, 20 bp, Artificial Sequence
  Synthetic: rene_2275_PHF20L1
ctgggatagcaatagattgc

SEQ ID NO: 2278 - DNA, 20 bp, Artificial Sequence
  Synthetic: rene_2276_PHF20L1
actagatgtaggcagatctt

SEQ ID NO: 2279 - DNA, 20 bp, Artificial Sequence
  Synthetic: rene_2277_PHF20L1
acaggggagttggagccacc

SEQ ID NO: 2280 - DNA, 20 bp, Artificial Sequence
  Synthetic: rene_2278_PHF20L1
cagtactcagcaaaagaaca

SEQ ID NO: 2281 - DNA, 20 bp, Artificial Sequence
  Synthetic: rene_2279_PHF20L1
ggggcaaacgaggtggttct

SEQ ID NO: 2282 - DNA, 20 bp, Artificial Sequence
  Synthetic: rene_2280_PHF21A
ggtatgtcactgcactcttc

SEQ ID NO: 2283 - DNA, 20 bp, Artificial Sequence
  Synthetic: rene_2281_PHF21A
cctgcacctgttcagcctgt

SEQ ID NO: 2284 - DNA, 20 bp, Artificial Sequence
  Synthetic: rene_2282_PHF21A
agaggggggtctaagcagtc

SEQ ID NO: 2285 - DNA, 20 bp, Artificial Sequence
  Synthetic: rene_2283_PHF21A
ccttctccagggagctgtgc

SEQ ID NO: 2286 - DNA, 20 bp, Artificial Sequence
  Synthetic: rene_2284_PHF21A
aaacaagaacgagaacaact

SEQ ID NO: 2287 - DNA, 20 bp, Artificial Sequence
  Synthetic: rene_2285_PHF21A
gctatggttgcagtctgccc

SEQ ID NO: 2288 - DNA, 20 bp, Artificial Sequence
  Synthetic: rene_2286_PHF21A
ggtgcagcaggtggggtgat

SEQ ID NO: 2289 - DNA, 20 bp, Artificial Sequence
  Synthetic: rene_2287_PHF21A
tcccccctcctagactcact

SEQ ID NO: 2290 - DNA, 20 bp, Artificial Sequence
  Synthetic: rene_2288_PHF21B
gtggcctgagctccctgaga

SEQ ID NO: 2291 - DNA, 20 bp, Artificial Sequence
  Synthetic: rene_2289_PHF21B
ggaacgatcactgcagtgcc

SEQ ID NO: 2292 - DNA, 20 bp, Artificial Sequence
  Synthetic: rene_2290_PHF21B
atgctgtcactgaccacaga

SEQ ID NO: 2293 - DNA, 20 bp, Artificial Sequence
  Synthetic: rene_2291_PHF21B
gtggagctgcttcttgaggt

SEQ ID NO: 2294 - DNA, 20 bp, Artificial Sequence
  Synthetic: rene_2292_PHF21B
tcgctgagcgcggcgatccg

SEQ ID NO: 2295 - DNA, 20 bp, Artificial Sequence
  Synthetic: rene_2293_PHF23
agtgctgcccacctccttgc

SEQ ID NO: 2296 - DNA, 20 bp, Artificial Sequence
  Synthetic: rene_2294_PHF23
ccagggggacctctcccatc

SEQ ID NO: 2297 - DNA, 20 bp, Artificial Sequence
  Synthetic: rene_2295_PHF23
gcatatgctggttacattcc

SEQ ID NO: 2298 - DNA, 20 bp, Artificial Sequence
  Synthetic: rene_2296_PHF23
ggaggcccccctaaccgccg

SEQ ID NO: 2299 - DNA, 20 bp, Artificial Sequence
  Synthetic: rene_2297_PHF23
ggcccatccagatcaaagag

SEQ ID NO: 2300 - DNA, 20 bp, Artificial Sequence
  Synthetic: rene_2298_PHF23
actgtcagcaggagggactc

SEQ ID NO: 2301 - DNA, 20 bp, Artificial Sequence
  Synthetic: rene_2299_PHF23
cccatccccaggagttggcc

SEQ ID NO: 2302 - DNA, 20 bp, Artificial Sequence
  Synthetic: rene_2300_PHF23
ctagggggaatgtaaccagc

SEQ ID NO: 2303 - DNA, 20 bp, Artificial Sequence
  Synthetic: rene_2301_PHF3
actacagctcacattaccat

SEQ ID NO: 2304 - DNA, 20 bp, Artificial Sequence
  Synthetic: rene_2302_PHF3
aatgagcagaccaactcaaa

SEQ ID NO: 2305 - DNA, 20 bp, Artificial Sequence
  Synthetic: rene_2303_PHF3
agataaagaagaacatgaac

SEQ ID NO: 2306 - DNA, 20 bp, Artificial Sequence
  Synthetic: rene_2304_PHF3
agtgacatacatacttcttc

SEQ ID NO: 2307 - DNA, 20 bp, Artificial Sequence
  Synthetic: rene_2305_PHF3
gcagtagatacagtcttccc

SEQ ID NO: 2308 - DNA, 20 bp, Artificial Sequence
  Synthetic: rene_2306_PHF3
cctcggagatcctcagaaga

SEQ ID NO: 2309 - DNA, 20 bp, Artificial Sequence
  Synthetic: rene_2307_PHF3
ataggccagtcaaagtcaga

SEQ ID NO: 2310 - DNA, 20 bp, Artificial Sequence
  Synthetic: rene_2308_PHF3
gggacacagatgctaaatat

SEQ ID NO: 2311 - DNA, 20 bp, Artificial Sequence
  Synthetic: rene_2309_PHF6
atatcaaagtctccaaattc

SEQ ID NO: 2312 - DNA, 20 bp, Artificial Sequence
  Synthetic: rene_2310_PHF6
gtatcatcacactctgataa

SEQ ID NO: 2313 - DNA, 20 bp, Artificial Sequence
  Synthetic: rene_2311_PHF6
aagggctgtcagaagatacc

SEQ ID NO: 2314 - DNA, 20 bp, Artificial Sequence
  Synthetic: rene_2312_PHF6
acatcacaaccaattgttgc

SEQ ID NO: 2315 - DNA, 20 bp, Artificial Sequence
  Synthetic: rene_2313_PHF6
ggtgatgagggctccagttc

SEQ ID NO: 2316 - DNA, 20 bp, Artificial Sequence
  Synthetic: rene_2314_PHF6
gagtacatcccaaatttatc

SEQ ID NO: 2317 - DNA, 20 bp, Artificial Sequence
  Synthetic: rene_2315_PHF6
agatattagtaactgtccac

SEQ ID NO: 2318 - DNA, 20 bp, Artificial Sequence
  Synthetic: rene_2316_PHF6
ttcctcccctacatggcaaa

SEQ ID NO: 2319 - DNA, 20 bp, Artificial Sequence
  Synthetic: rene_2317_PHF7
gggatccccaggttctcgaa

SEQ ID NO: 2320 - DNA, 20 bp, Artificial Sequence
  Synthetic: rene_2318_PHF7
tgcagagacaacaccttgga

SEQ ID NO: 2321 - DNA, 20 bp, Artificial Sequence
  Synthetic: rene_2319_PHF7
ctctgggttaccctcctagt

SEQ ID NO: 2322 - DNA, 20 bp, Artificial Sequence
  Synthetic: rene_2320_PHF7
tgaggcactgatccttctgg

SEQ ID NO: 2323 - DNA, 20 bp, Artificial Sequence
  Synthetic: rene_2321_PHF7
tgacaaacatcgcccaacac

SEQ ID NO: 2324 - DNA, 20 bp, Artificial Sequence
  Synthetic: rene_2322_PHF7
atgtcttcaggcagaaatcc

SEQ ID NO: 2325 - DNA, 20 bp, Artificial Sequence
  Synthetic: rene_2323_PHF7
gattgttacactgtggacat

SEQ ID NO: 2326 - DNA, 20 bp, Artificial Sequence
  Synthetic: rene_2324_PHF7
ctcccccacatgcccatgtt

SEQ ID NO: 2327 - DNA, 20 bp, Artificial Sequence
  Synthetic: rene_2325_PHF8
gctgcagcagctgcaaagct

SEQ ID NO: 2328 - DNA, 20 bp, Artificial Sequence
  Synthetic: rene_2326_PHF8
gtggcacctctgtctggtac

SEQ ID NO: 2329 - DNA, 20 bp, Artificial Sequence
  Synthetic: rene_2327_PHF8
gagggcagtgacagcctgga

SEQ ID NO: 2330 - DNA, 20 bp, Artificial Sequence
  Synthetic: rene_2328_PHF8
cctgggccatgccaaaggca

SEQ ID NO: 2331 - DNA, 20 bp, Artificial Sequence
  Synthetic: rene_2329_PHF8
ggactccatggagcatcatc

SEQ ID NO: 2332 - DNA, 20 bp, Artificial Sequence
  Synthetic: rene_2330_PHF8
gacccatgacagctttcgaa

SEQ ID NO: 2333 - DNA, 20 bp, Artificial Sequence
  Synthetic: rene_2331_PHF8
ccacataccaacagatggtc

SEQ ID NO: 2334 - DNA, 20 bp, Artificial Sequence
  Synthetic: rene_2332_PHF8
cccttgtgtgtatcatgccc

SEQ ID NO: 2335 - DNA, 20 bp, Artificial Sequence
  Synthetic: rene_2333_PHIP
ccagtatcaggatctagaaa

SEQ ID NO: 2336 - DNA, 20 bp, Artificial Sequence
  Synthetic: rene_2334_PHIP
ataaaagaaataccataacc

SEQ ID NO: 2337 - DNA, 20 bp, Artificial Sequence
  Synthetic: rene_2335_PHIP
cctggtattgcagatgcatt

SEQ ID NO: 2338 - DNA, 20 bp, Artificial Sequence
  Synthetic: rene_2336_PHIP
cttccaggtcccctcttcac

SEQ ID NO: 2339 - DNA, 20 bp, Artificial Sequence
  Synthetic: rene_2337_PHIP
aaggaagctgaatgggaaat

SEQ ID NO: 2340 - DNA, 20 bp, Artificial Sequence
  Synthetic: rene_2338_PHIP
tctggctgacctgatccaaa

SEQ ID NO: 2341 - DNA, 20 bp, Artificial Sequence
  Synthetic: rene_2339_PHIP
acattagaagaatggttgcc

SEQ ID NO: 2342 - DNA, 20 bp, Artificial Sequence
  Synthetic: rene_2340_PHIP
gtcatggcactaggaataat

SEQ ID NO: 2343 - DNA, 20 bp, Artificial Sequence
  Synthetic: rene_2341_PHRF1
ccctgagtacccgctacctc

SEQ ID NO: 2344 - DNA, 20 bp, Artificial Sequence
  Synthetic: rene_2342_PHRF1
ccaccaaattgagctcgaat

SEQ ID NO: 2345 - DNA, 20 bp, Artificial Sequence
  Synthetic: rene_2343_PHRF1
agtgcatttgtattcgagct

SEQ ID NO: 2346 - DNA, 20 bp, Artificial Sequence
  Synthetic: rene_2344_PHRF1
aattctgatgatgatgcaga

SEQ ID NO: 2347 - DNA, 20 bp, Artificial Sequence
  Synthetic: rene_2345_PHRF1
ttgtgcctgcgcatgtgcct

SEQ ID NO: 2348 - DNA, 20 bp, Artificial Sequence
  Synthetic: rene_2346_PHRF1
ccagtcacgtgcttccggaa

SEQ ID NO: 2349 - DNA, 20 bp, Artificial Sequence
  Synthetic: rene_2347_PHRF1
tccgcagctagcctgggggc

SEQ ID NO: 2350 - DNA, 20 bp, Artificial Sequence
  Synthetic: rene_2348_PHRF1
cagccccggcctgccgcctg

SEQ ID NO: 2351 - DNA, 20 bp, Artificial Sequence
  Synthetic: rene_2349_PIK3CA
gaggatagacatacattgct

SEQ ID NO: 2352 - DNA, 20 bp, Artificial Sequence
  Synthetic: rene_2350_PIK3CA
gcaccacctcaataagtccc

SEQ ID NO: 2353 - DNA, 20 bp, Artificial Sequence
  Synthetic: rene_2351_PIK3CA
agagtatacttctgcttgtc

SEQ ID NO: 2354 - DNA, 20 bp, Artificial Sequence
  Synthetic: rene_2352_PIK3CA
gaggagacagaaagccctgt

SEQ ID NO: 2355 - DNA, 20 bp, Artificial Sequence
  Synthetic: rene_2353_PIK3CA
gtaagtgttactcaagaagc

SEQ ID NO: 2356 - DNA, 20 bp, Artificial Sequence
  Synthetic: rene_2354_PIK3CA
caagcaccgaacagcaaaac

SEQ ID NO: 2357 - DNA, 20 bp, Artificial Sequence
  Synthetic: rene_2355_PIK3CA
gtagtaaacattctactagg

SEQ ID NO: 2358 - DNA, 20 bp, Artificial Sequence
  Synthetic: rene_2356_PIK3CA
gttgagcaaatgaggcgacc

SEQ ID NO: 2359 - DNA, 20 bp, Artificial Sequence
  Synthetic: rene_2357_PIK3R1
gaatatgccaagacagatat

SEQ ID NO: 2360 - DNA, 20 bp, Artificial Sequence
  Synthetic: rene_2358_PIK3R1
gtagacgcatctcgtaccaa

SEQ ID NO: 2361 - DNA, 20 bp, Artificial Sequence
  Synthetic: rene_2359_PIK3R1
cctacagcttcaatattatc

SEQ ID NO: 2362 - DNA, 20 bp, Artificial Sequence
  Synthetic: rene_2360_PIK3R1
gtacgagatgcgtctactaa

SEQ ID NO: 2363 - DNA, 20 bp, Artificial Sequence
  Synthetic: rene_2361_PIK3R1
gaagaacctggtgcaacagg

SEQ ID NO: 2364 - DNA, 20 bp, Artificial Sequence
  Synthetic: rene_2362_PIK3R1
ggattatactgagctagaga

SEQ ID NO: 2365 - DNA, 20 bp, Artificial Sequence
  Synthetic: rene_2363_PIK3R1
atctcaactgaatggaatga

SEQ ID NO: 2366 - DNA, 20 bp, Artificial Sequence
  Synthetic: rene_2364_PIK3R1
gctgacgctttcaaacgcta

SEQ ID NO: 2367 - DNA, 20 bp, Artificial Sequence
  Synthetic: rene_2365_PLSCR1
ccaaccacacactgttcatc

SEQ ID NO: 2368 - DNA, 20 bp, Artificial Sequence
  Synthetic: rene_2366_PLSCR1
gggtacagcaatcagtatct

SEQ ID NO: 2369 - DNA, 20 bp, Artificial Sequence
  Synthetic: rene_2367_PLSCR1
ccttgaggattattgataat

SEQ ID NO: 2370 - DNA, 20 bp, Artificial Sequence
  Synthetic: rene_2368_PLSCR1
atggaggctgtggcgctggc

SEQ ID NO: 2371 - DNA, 20 bp, Artificial Sequence
  Synthetic: rene_2369_PLSCR1
ctgatgaatcagtatctgat

SEQ ID NO: 2372 - DNA, 20 bp, Artificial Sequence
  Synthetic: rene_2370_PLSCR1
ctgtcccaaatcagccagtg

SEQ ID NO: 2373 - DNA, 20 bp, Artificial Sequence
  Synthetic: rene_2371_PLSCR1
acatcaaggtctaaagggaa

SEQ ID NO: 2374 - DNA, 20 bp, Artificial Sequence
  Synthetic: rene_2372_PLSCR1
agagaggcatttacagacgc

SEQ ID NO: 2375 - DNA, 20 bp, Artificial Sequence
  Synthetic: rene_2373_PPM1B
agagcagaagaggatgaatt

SEQ ID NO: 2376 - DNA, 20 bp, Artificial Sequence
  Synthetic: rene_2374_PPM1B
cctgagagcttccaccaatt

SEQ ID NO: 2377 - DNA, 20 bp, Artificial Sequence
  Synthetic: rene_2375_PPM1B
gataaacccaaaactgaaaa

SEQ ID NO: 2378 - DNA, 20 bp, Artificial Sequence
  Synthetic: rene_2376_PPM1B
acctaagcatatctacttta

SEQ ID NO: 2379 - DNA, 20 bp, Artificial Sequence
  Synthetic: rene_2377_PPM1B
ggtttatccaaaaatgcacc

SEQ ID NO: 2380 - DNA, 20 bp, Artificial Sequence
  Synthetic: rene_2378_PPM1B
cctgtgatccactttcctct

SEQ ID NO: 2381 - DNA, 20 bp, Artificial Sequence
  Synthetic: rene_2379_PPM1B
cactgaaagctcaagagcag

SEQ ID NO: 2382 - DNA, 20 bp, Artificial Sequence
  Synthetic: rene_2380_PPM1B
tctatgtggattcagtctac

SEQ ID NO: 2383 - DNA, 20 bp, Artificial Sequence
  Synthetic: rene_2381_PRDM1
gcagcaccagcaatctcaag

SEQ ID NO: 2384 - DNA, 20 bp, Artificial Sequence
  Synthetic: rene_2382_PRDM1
aagagaagtgtacatacatt

SEQ ID NO: 2385 - DNA, 20 bp, Artificial Sequence
  Synthetic: rene_2383_PRDM1
atggtccccttggtcccctc

SEQ ID NO: 2386 - DNA, 20 bp, Artificial Sequence
  Synthetic: rene_2384_PRDM1
aagtatgccaccaacagtga

SEQ ID NO: 2387 - DNA, 20 bp, Artificial Sequence
  Synthetic: rene_2385_PRDM1
ggctcctaccctggctacgc

SEQ ID NO: 2388 - DNA, 20 bp, Artificial Sequence
  Synthetic: rene_2386_PRDM1
gacccctaataggtgaaatc

SEQ ID NO: 2389 - DNA, 20 bp, Artificial Sequence
  Synthetic: rene_2387_PRDM1
cttctccactacagagatca

SEQ ID NO: 2390 - DNA, 20 bp, Artificial Sequence
  Synthetic: rene_2388_PRDM1
aggtgaaccttgaggctaca

SEQ ID NO: 2391 - DNA, 20 bp, Artificial Sequence
  Synthetic: rene_2389_PRDM10
ccggaaggccttcccacact

SEQ ID NO: 2392 - DNA, 20 bp, Artificial Sequence
  Synthetic: rene_2390_PRDM10
catgaagacctatggtttga

SEQ ID NO: 2393 - DNA, 20 bp, Artificial Sequence
  Synthetic: rene_2391_PRDM10
gtgatatgcacttcgctgct

SEQ ID NO: 2394 - DNA, 20 bp, Artificial Sequence
  Synthetic: rene_2392_PRDM10
atgaggctgaaccagccact

SEQ ID NO: 2395 - DNA, 20 bp, Artificial Sequence
  Synthetic: rene_2393_PRDM10
gctggtgatttccaggcgga

SEQ ID NO: 2396 - DNA, 20 bp, Artificial Sequence
  Synthetic: rene_2394_PRDM10
actacagacagcgccactgg

SEQ ID NO: 2397 - DNA, 20 bp, Artificial Sequence
  Synthetic: rene_2395_PRDM10
cccaggcctcattgccagtt

SEQ ID NO: 2398 - DNA, 20 bp, Artificial Sequence
  Synthetic: rene_2396_PRDM10
cagaccccggccaggtagct

SEQ ID NO: 2399 - DNA, 20 bp, Artificial Sequence
  Synthetic: rene_2397_PRDM11
ccctaactgtattcgcctaa

SEQ ID NO: 2400 - DNA, 20 bp, Artificial Sequence
  Synthetic: rene_2398_PRDM11
gtgtagtaatcagccttgag

SEQ ID NO: 2401 - DNA, 20 bp, Artificial Sequence
  Synthetic: rene_2399_PRDM11
agattcacaccatcaaactt

SEQ ID NO: 2402 - DNA, 20 bp, Artificial Sequence
  Synthetic: rene_2400_PRDM11
ccagacttaagcatgtctaa

SEQ ID NO: 2403 - DNA, 20 bp, Artificial Sequence
  Synthetic: rene_2401_PRDM11
aggagaagtctgggaacagt

SEQ ID NO: 2404 - DNA, 20 bp, Artificial Sequence
  Synthetic: rene_2402_PRDM11
ccctgtctcagcacagagag

SEQ ID NO: 2405 - DNA, 20 bp, Artificial Sequence
  Synthetic: rene_2403_PRDM11
ctgggacatgctgtgcaggc

SEQ ID NO: 2406 - DNA, 20 bp, Artificial Sequence
  Synthetic: rene_2404_PRDM11
ctgatgaccagtgaggtgct

SEQ ID NO: 2407 - DNA, 20 bp, Artificial Sequence
  Synthetic: rene_2405_PRDM13
gataccccaacagccttaag

SEQ ID NO: 2408 - DNA, 20 bp, Artificial Sequence
  Synthetic: rene_2406_PRDM13
gggagagaccgaggccatca

SEQ ID NO: 2409 - DNA, 20 bp, Artificial Sequence
  Synthetic: rene_2407_PRDM13
gccgcgccttcccaggcagg

SEQ ID NO: 2410 - DNA, 20 bp, Artificial Sequence
  Synthetic: rene_2408_PRDM13
tggctgcccggattaaccct

SEQ ID NO: 2411 - DNA, 20 bp, Artificial Sequence
  Synthetic: rene_2409_PRDM13
gcgagcagactctggccagg

SEQ ID NO: 2412 - DNA, 20 bp, Artificial Sequence
  Synthetic: rene_2410_PRDM13
agcgggtaataagcggtggt

SEQ ID NO: 2413 - DNA, 20 bp, Artificial Sequence
  Synthetic: rene_2411_PRDM13
ttaggcccgggctccctgcg

SEQ ID NO: 2414 - DNA, 20 bp, Artificial Sequence
  Synthetic: rene_2412_PRDM13
cagtctacaacggggagctg

SEQ ID NO: 2415 - DNA, 20 bp, Artificial Sequence
  Synthetic: rene_2413_PRDM14
cctacaaatattacagagat

SEQ ID NO: 2416 - DNA, 20 bp, Artificial Sequence
  Synthetic: rene_2414_PRDM14
ggaccatcctctgactgctt

SEQ ID NO: 2417 - DNA, 20 bp, Artificial Sequence
  Synthetic: rene_2415_PRDM14
tcatagcagtctccatacca

SEQ ID NO: 2418 - DNA, 20 bp, Artificial Sequence
  Synthetic: rene_2416_PRDM14
cctgttctctctgcaaacga

SEQ ID NO: 2419 - DNA, 20 bp, Artificial Sequence
  Synthetic: rene_2417_PRDM14
tgagagctgcaaagagatcc

SEQ ID NO: 2420 - DNA, 20 bp, Artificial Sequence
  Synthetic: rene_2418_PRDM14
ccacagatgctgcatgagca

SEQ ID NO: 2421 - DNA, 20 bp, Artificial Sequence
  Synthetic: rene_2419_PRDM14
ccttgaaagggcccaaacct

SEQ ID NO: 2422 - DNA, 20 bp, Artificial Sequence
  Synthetic: rene_2420_PRDM14
ctatcgcccttgtccacaca

SEQ ID NO: 2423 - DNA, 20 bp, Artificial Sequence
  Synthetic: rene_2421_PRDM15
ctgggggaaccaggaaaatc

SEQ ID NO: 2424 - DNA, 20 bp, Artificial Sequence
  Synthetic: rene_2422_PRDM15
cctgtgaggtctgcagcaag

SEQ ID NO: 2425 - DNA, 20 bp, Artificial Sequence
  Synthetic: rene_2423_PRDM15
ccagtgcaatatctgcagca

SEQ ID NO: 2426 - DNA, 20 bp, Artificial Sequence
  Synthetic: rene_2424_PRDM15
agtgcgaagagtgtgcaaaa

SEQ ID NO: 2427 - DNA, 20 bp, Artificial Sequence
  Synthetic: rene_2425_PRDM15
ctggttcccccaggaaaagt

SEQ ID NO: 2428 - DNA, 20 bp, Artificial Sequence
  Synthetic: rene_2426_PRDM15
gcgaccctcctggactcaaa

SEQ ID NO: 2429 - DNA, 20 bp, Artificial Sequence
  Synthetic: rene_2427_PRDM15
gccgaagggaagcacgggaa

SEQ ID NO: 2430 - DNA, 20 bp, Artificial Sequence
  Synthetic: rene_2428_PRDM15
ttccgaggagatcccgatct

SEQ ID NO: 2431 - DNA, 20 bp, Artificial Sequence
  Synthetic: rene_2429_PRDM16
gacgagaaagaagactctta

SEQ ID NO: 2432 - DNA, 20 bp, Artificial Sequence
  Synthetic: rene_2430_PRDM16
ctataaagtcattaaggaca

SEQ ID NO: 2433 - DNA, 20 bp, Artificial Sequence
  Synthetic: rene_2431_PRDM16
cgagaaataagagtcttctt

SEQ ID NO: 2434 - DNA, 20 bp, Artificial Sequence
  Synthetic: rene_2432_PRDM16
ggaaggggctggacctccgc

SEQ ID NO: 2435 - DNA, 20 bp, Artificial Sequence
  Synthetic: rene_2433_PRDM16
catccacgcagaacttctca

SEQ ID NO: 2436 - DNA, 20 bp, Artificial Sequence
  Synthetic: rene_2434_PRDM16
atctcaccaccaagcccaaa

SEQ ID NO: 2437 - DNA, 20 bp, Artificial Sequence
  Synthetic: rene_2435_PRDM16
acttcaaatgcttcctcagc

SEQ ID NO: 2438 - DNA, 20 bp, Artificial Sequence
  Synthetic: rene_2436_PRDM16
gctagcttcctcgccctcgc

SEQ ID NO: 2439 - DNA, 20 bp, Artificial Sequence
  Synthetic: rene_2437_PRDM2
cctgtagaaaaccctgcaga

SEQ ID NO: 2440 - DNA, 20 bp, Artificial Sequence
  Synthetic: rene_2438_PRDM2
cctgcccctactgttgagtc

SEQ ID NO: 2441 - DNA, 20 bp, Artificial Sequence
  Synthetic: rene_2439_PRDM2
actacacacaatattccaca

SEQ ID NO: 2442 - DNA, 20 bp, Artificial Sequence
  Synthetic: rene_2440_PRDM2
accgaagctgcaaacttgac

SEQ ID NO: 2443 - DNA, 20 bp, Artificial Sequence
  Synthetic: rene_2441_PRDM2
caaacagaacacacaaagat

SEQ ID NO: 2444 - DNA, 20 bp, Artificial Sequence
  Synthetic: rene_2442_PRDM2
tctgggagagatgagagaga

SEQ ID NO: 2445 - DNA, 20 bp, Artificial Sequence
  Synthetic: rene_2443_PRDM2
ccttctctggatcagtggca

SEQ ID NO: 2446 - DNA, 20 bp, Artificial Sequence
  Synthetic: rene_2444_PRDM2
gttgtaaacttcctttcaca

SEQ ID NO: 2447 - DNA, 20 bp, Artificial Sequence
  Synthetic: rene_2445_PRDM4
gctgacagaccacctccaca

SEQ ID NO: 2448 - DNA, 20 bp, Artificial Sequence
  Synthetic: rene_2446_PRDM4
aggtaacccacacatcaccc

SEQ ID NO: 2449 - DNA, 20 bp, Artificial Sequence
  Synthetic: rene_2447_PRDM4
catcatgaggataagccacc

SEQ ID NO: 2450 - DNA, 20 bp, Artificial Sequence
  Synthetic: rene_2448_PRDM4
gtgatcccagcaacctgcgg

SEQ ID NO: 2451 - DNA, 20 bp, Artificial Sequence
  Synthetic: rene_2449_PRDM4
tgtgcagaaagagactcatc

SEQ ID NO: 2452 - DNA, 20 bp, Artificial Sequence
  Synthetic: rene_2450_PRDM4
cagtgaaggtgatacaaaag

SEQ ID NO: 2453 - DNA, 20 bp, Artificial Sequence
  Synthetic: rene_2451_PRDM4
gaaggagagataaaagcttg

SEQ ID NO: 2454 - DNA, 20 bp, Artificial Sequence
  Synthetic: rene_2452_PRDM4
gtggcttatcctcatgatgg

SEQ ID NO: 2455 - DNA, 20 bp, Artificial Sequence
  Synthetic: rene_2453_PRDM5
gctgattagctgaaataaat

SEQ ID NO: 2456 - DNA, 20 bp, Artificial Sequence
  Synthetic: rene_2454_PRDM5
gatgctaccaacccacggca

SEQ ID NO: 2457 - DNA, 20 bp, Artificial Sequence
  Synthetic: rene_2455_PRDM5
caaggaatgactacctcaaa

SEQ ID NO: 2458 - DNA, 20 bp, Artificial Sequence
  Synthetic: rene_2456_PRDM5
agaggaaggatacattaaat

SEQ ID NO: 2459 - DNA, 20 bp, Artificial Sequence
  Synthetic: rene_2457_PRDM5
ccagcagtggtacactcaga

SEQ ID NO: 2460 - DNA, 20 bp, Artificial Sequence
  Synthetic: rene_2458_PRDM5
ccataagaagtttacaagga

SEQ ID NO: 2461 - DNA, 20 bp, Artificial Sequence
  Synthetic: rene_2459_PRDM5
cagagacacctgctaataca

SEQ ID NO: 2462 - DNA, 20 bp, Artificial Sequence
  Synthetic: rene_2460_PRDM5
gcctgaagaaaatgctgatt

SEQ ID NO: 2463 - DNA, 20 bp, Artificial Sequence
  Synthetic: rene_2461_PRDM6
ccggggccaccaccctcaac

SEQ ID NO: 2464 - DNA, 20 bp, Artificial Sequence
  Synthetic: rene_2462_PRDM6
atcctgggcaatgcattgta

SEQ ID NO: 2465 - DNA, 20 bp, Artificial Sequence
  Synthetic: rene_2463_PRDM6
ggatccccttacaatgcatt

SEQ ID NO: 2466 - DNA, 20 bp, Artificial Sequence
  Synthetic: rene_2464_PRDM6
ccccagactccgtgcagcag

SEQ ID NO: 2467 - DNA, 20 bp, Artificial Sequence
  Synthetic: rene_2465_PRDM6
ccagccttcagaactgagga

SEQ ID NO: 2468 - DNA, 20 bp, Artificial Sequence
  Synthetic: rene_2466_PRDM6
caaagatgccagtcactgaa

SEQ ID NO: 2469 - DNA, 20 bp, Artificial Sequence
  Synthetic: rene_2467_PRDM6
acccagcggatcctcttaca

SEQ ID NO: 2470 - DNA, 20 bp, Artificial Sequence
  Synthetic: rene_2468_PRDM6
atcaaatcaacgtgaaaaac

SEQ ID NO: 2471 - DNA, 20 bp, Artificial Sequence
  Synthetic: rene_2469_PRDM7
gtctagagtgctgtccagag

SEQ ID NO: 2472 - DNA, 20 bp, Artificial Sequence
  Synthetic: rene_2470_PRDM7
acttgaaaaggccagacagc

SEQ ID NO: 2473 - DNA, 20 bp, Artificial Sequence
  Synthetic: rene_2471_PRDM7
tgagcctgctctgagtcact

SEQ ID NO: 2474 - DNA, 20 bp, Artificial Sequence
  Synthetic: rene_2472_PRDM7
ctgaatacaagtgactcaga

SEQ ID NO: 2475 - DNA, 20 bp, Artificial Sequence
  Synthetic: rene_2473_PRDM7
catccacatactcatagcag

SEQ ID NO: 2476 - DNA, 20 bp, Artificial Sequence
  Synthetic: rene_2474_PRDM7
catatacttcaccaaggaag

SEQ ID NO: 2477 - DNA, 20 bp, Artificial Sequence
  Synthetic: rene_2475_PRDM7
acattcctatagcgagtttt

SEQ ID NO: 2478 - DNA, 20 bp, Artificial Sequence
  Synthetic: rene_2476_PRDM7
atggcctgccttcggtgaca

SEQ ID NO: 2479 - DNA, 20 bp, Artificial Sequence
  Synthetic: rene_2477_PRDM8
gtacgggaaagaactgactg

SEQ ID NO: 2480 - DNA, 20 bp, Artificial Sequence
  Synthetic: rene_2478_PRDM8
cgctgccccaagagacttca

SEQ ID NO: 2481 - DNA, 20 bp, Artificial Sequence
  Synthetic: rene_2479_PRDM8
ccgtaccaaactagtaactc

SEQ ID NO: 2482 - DNA, 20 bp, Artificial Sequence
  Synthetic: rene_2480_PRDM8
ccagcgtttacaccacctgc

SEQ ID NO: 2483 - DNA, 20 bp, Artificial Sequence
  Synthetic: rene_2481_PRDM8
atagctctcaagtctactga

SEQ ID NO: 2484 - DNA, 20 bp, Artificial Sequence
  Synthetic: rene_2482_PRDM8
tcctctcgccgccgcttcac

SEQ ID NO: 2485 - DNA, 20 bp, Artificial Sequence
  Synthetic: rene_2483_PRDM8
agttcccctatgtggcgcat

SEQ ID NO: 2486 - DNA, 20 bp, Artificial Sequence
  Synthetic: rene_2484_PRDM8
gtccctgtgtcctgagccat

SEQ ID NO: 2487 - DNA, 20 bp, Artificial Sequence
  Synthetic: rene_2485_PRDM9
gctggaagtcacacctcctc

SEQ ID NO: 2488 - DNA, 20 bp, Artificial Sequence
  Synthetic: rene_2486_PRDM9
cctgtgttccctggattcac

SEQ ID NO: 2489 - DNA, 20 bp, Artificial Sequence
  Synthetic: rene_2487_PRDM9
gctggcagtcagtcctcctc

SEQ ID NO: 2490 - DNA, 20 bp, Artificial Sequence
  Synthetic: rene_2488_PRDM9
gtcttgagtgctgtccagag

SEQ ID NO: 2491 - DNA, 20 bp, Artificial Sequence
  Synthetic: rene_2489_PRDM9
gcaataagtcacacctcctc

SEQ ID NO: 2492 - DNA, 20 bp, Artificial Sequence
  Synthetic: rene_2490_PRDM9
gagataagtcaaacctcctc

SEQ ID NO: 2493 - DNA, 20 bp, Artificial Sequence
  Synthetic: rene_2491_PRDM9
gcgataagtcacacctcctc

SEQ ID NO: 2494 - DNA, 20 bp, Artificial Sequence
  Synthetic: rene_2492_PRDM9
agtgttaaatcagatgttat

SEQ ID NO: 2495 - DNA, 20 bp, Artificial Sequence
  Synthetic: rene_2493_PRKAR1B
gcgcggcaaaagtcaaactc

SEQ ID NO: 2496 - DNA, 20 bp, Artificial Sequence
  Synthetic: rene_2494_PRKAR1B
tctccatcttcaaactggac

SEQ ID NO: 2497 - DNA, 20 bp, Artificial Sequence
  Synthetic: rene_2495_PRKAR1B
aagatggagagaaaattgtg

SEQ ID NO: 2498 - DNA, 20 bp, Artificial Sequence
  Synthetic: rene_2496_PRKAR1B
ccgcgccaaaatctgcctgt

SEQ ID NO: 2499 - DNA, 20 bp, Artificial Sequence
  Synthetic: rene_2497_PRKAR1B
acttttgccgcgccaaaatc

SEQ ID NO: 2500 - DNA, 20 bp, Artificial Sequence
  Synthetic: rene_2498_PRKAR1B
aggacctgctggatcccgtg

SEQ ID NO: 2501 - DNA, 20 bp, Artificial Sequence
  Synthetic: rene_2499_PRKAR1B
acggtcgcagccctgggggt

SEQ ID NO: 2502 - DNA, 20 bp, Artificial Sequence
  Synthetic: rene_2500_PRMT1
atgcaagacatgtcgaagcc

SEQ ID NO: 2503 - DNA, 20 bp, Artificial Sequence
  Synthetic: rene_2501_PRMT1
gggtccacgacatccactag

SEQ ID NO: 2504 - DNA, 20 bp, Artificial Sequence
  Synthetic: rene_2502_PRMT1
ataaccggcacctcttcaag

SEQ ID NO: 2505 - DNA, 20 bp, Artificial Sequence
  Synthetic: rene_2503_PRMT1
actcctacgcacactttggc

SEQ ID NO: 2506 - DNA, 20 bp, Artificial Sequence
  Synthetic: rene_2504_PRMT1
acgatcttcaccgcataatc

SEQ ID NO: 2507 - DNA, 20 bp, Artificial Sequence
  Synthetic: rene_2505_PRMT1
tagccaccttggctaatggg

SEQ ID NO: 2508 - DNA, 20 bp, Artificial Sequence
  Synthetic: rene_2506_PRMT1
gatgtcatgtcctcagcgtt

SEQ ID NO: 2509 - DNA, 20 bp, Artificial Sequence
  Synthetic: rene_2507_PRMT1
tgaggcaggcgttggtgacc

SEQ ID NO: 2510 - DNA, 20 bp, Artificial Sequence
  Synthetic: rene_2508_PRMT2
tctgcaacacaactgaaccc

SEQ ID NO: 2511 - DNA, 20 bp, Artificial Sequence
  Synthetic: rene_2509_PRMT2
aaaccagaagactgtctctc

SEQ ID NO: 2512 - DNA, 20 bp, Artificial Sequence
  Synthetic: rene_2510_PRMT2
aaagcccaagtataaccaca

SEQ ID NO: 2513 - DNA, 20 bp, Artificial Sequence
  Synthetic: rene_2511_PRMT2
agaggagaaaaaattcttat

SEQ ID NO: 2514 - DNA, 20 bp, Artificial Sequence
  Synthetic: rene_2512_PRMT2
caaataaagcatcaactgtc

SEQ ID NO: 2515 - DNA, 20 bp, Artificial Sequence
  Synthetic: rene_2513_PRMT2
agttcatgatcgagtccatc

SEQ ID NO: 2516 - DNA, 20 bp, Artificial Sequence
  Synthetic: rene_2514_PRMT2
gcgtccacttccagagcctg

SEQ ID NO: 2517 - DNA, 20 bp, Artificial Sequence
  Synthetic: rene_2515_PRMT2
ccggaatgtacccacagcag

SEQ ID NO: 2518 - DNA, 20 bp, Artificial Sequence
  Synthetic: rene_2516_PRMT3
atataccaaaatccacatat

SEQ ID NO: 2519 - DNA, 20 bp, Artificial Sequence
  Synthetic: rene_2517_PRMT3
ggatgatgtctatggcttca

SEQ ID NO: 2520 - DNA, 20 bp, Artificial Sequence
  Synthetic: rene_2518_PRMT3
ccctgaaaatcacaaggaca

SEQ ID NO: 2521 - DNA, 20 bp, Artificial Sequence
  Synthetic: rene_2519_PRMT3
gcagcaaacatagagagaat

SEQ ID NO: 2522 - DNA, 20 bp, Artificial Sequence
  Synthetic: rene_2520_PRMT3
gtatatgaaatctcggtagc

SEQ ID NO: 2523 - DNA, 20 bp, Artificial Sequence
  Synthetic: rene_2521_PRMT3
acactgtaagtctgagcatc

SEQ ID NO: 2524 - DNA, 20 bp, Artificial Sequence
  Synthetic: rene_2522_PRMT3
actgagtccattggggtatg

SEQ ID NO: 2525 - DNA, 20 bp, Artificial Sequence
  Synthetic: rene_2523_PRMT3
atattgacagcatggttcat

SEQ ID NO: 2526 - DNA, 20 bp, Artificial Sequence
  Synthetic: rene_2524_PRMT5
tcctccccactgtactcctc

SEQ ID NO: 2527 - DNA, 20 bp, Artificial Sequence
  Synthetic: rene_2525_PRMT5
tctggagccacccattccct

SEQ ID NO: 2528 - DNA, 20 bp, Artificial Sequence
  Synthetic: rene_2526_PRMT5
ctgtggaggtgaacacagta

SEQ ID NO: 2529 - DNA, 20 bp, Artificial Sequence
  Synthetic: rene_2527_PRMT5
ctgaccaataagaagggatt

SEQ ID NO: 2530 - DNA, 20 bp, Artificial Sequence
  Synthetic: rene_2528_PRMT5
tccacagcatacagctttat

SEQ ID NO: 2531 - DNA, 20 bp, Artificial Sequence
  Synthetic: rene_2529_PRMT5
agtctggacgaatccatgga

SEQ ID NO: 2532 - DNA, 20 bp, Artificial Sequence
  Synthetic: rene_2530_PRMT5
ggaagtgctgggctccatcc

SEQ ID NO: 2533 - DNA, 20 bp, Artificial Sequence
  Synthetic: rene_2531_PRMT5
aagagggagttcattcagga

SEQ ID NO: 2534 - DNA, 20 bp, Artificial Sequence
  Synthetic: rene_2532_PRMT6
acccggccactcactggaaa

SEQ ID NO: 2535 - DNA, 20 bp, Artificial Sequence
  Synthetic: rene_2533_PRMT6
aggagagatcacgctgctgc

SEQ ID NO: 2536 - DNA, 20 bp, Artificial Sequence
  Synthetic: rene_2534_PRMT6
ggtccacgaggagatgatcg

SEQ ID NO: 2537 - DNA, 20 bp, Artificial Sequence
  Synthetic: rene_2535_PRMT6
tccgactcccctccagggaa

SEQ ID NO: 2538 - DNA, 20 bp, Artificial Sequence
  Synthetic: rene_2536_PRMT6
cagtgagtggccgggtgaaa

SEQ ID NO: 2539 - DNA, 20 bp, Artificial Sequence
  Synthetic: rene_2537_PRMT6
ccatctggttccaggtgacc

SEQ ID NO: 2540 - DNA, 20 bp, Artificial Sequence
  Synthetic: rene_2538_PRMT6
gtcttctcctcctggtctcc

SEQ ID NO: 2541 - DNA, 20 bp, Artificial Sequence
  Synthetic: rene_2539_PRMT6
ctcagctagagctctcccgc

SEQ ID NO: 2542 - DNA, 20 bp, Artificial Sequence
  Synthetic: rene_2540_PRMT7
gagagatcaatgaccaggac

SEQ ID NO: 2543 - DNA, 20 bp, Artificial Sequence
  Synthetic: rene_2541_PRMT7
gtgataagattaaggttatc

SEQ ID NO: 2544 - DNA, 20 bp, Artificial Sequence
  Synthetic: rene_2542_PRMT7
tgagaagctgctgaactctc

SEQ ID NO: 2545 - DNA, 20 bp, Artificial Sequence
  Synthetic: rene_2543_PRMT7
accccgacacaggcgacatc

SEQ ID NO: 2546 - DNA, 20 bp, Artificial Sequence
  Synthetic: rene_2544_PRMT7
aatgtcccaccacgagagaa

SEQ ID NO: 2547 - DNA, 20 bp, Artificial Sequence
  Synthetic: rene_2545_PRMT7
tccacaatcttcacagcagc

SEQ ID NO: 2548 - DNA, 20 bp, Artificial Sequence
  Synthetic: rene_2546_PRMT7
ccatccacgtgcagaccagc

SEQ ID NO: 2549 - DNA, 20 bp, Artificial Sequence
  Synthetic: rene_2547_PRMT7
cagtcgagagttcagcagct

SEQ ID NO: 2550 - DNA, 20 bp, Artificial Sequence
  Synthetic: rene_2548_PRMT8
agggacagctgtgtgaaaca

SEQ ID NO: 2551 - DNA, 20 bp, Artificial Sequence
  Synthetic: rene_2549_PRMT8
tgactactcagagaagatca

SEQ ID NO: 2552 - DNA, 20 bp, Artificial Sequence
  Synthetic: rene_2550_PRMT8
ctcccccctccggacagtga

SEQ ID NO: 2553 - DNA, 20 bp, Artificial Sequence
  Synthetic: rene_2551_PRMT8
gatccacgatgtccactaga

SEQ ID NO: 2554 - DNA, 20 bp, Artificial Sequence
  Synthetic: rene_2552_PRMT8
ccaagtgccacaagaaaatg

SEQ ID NO: 2555 - DNA, 20 bp, Artificial Sequence
  Synthetic: rene_2553_PRMT8
acacagctgtcccttaaaat

SEQ ID NO: 2556 - DNA, 20 bp, Artificial Sequence
  Synthetic: rene_2554_PRMT8
ttgtggcacttggtaaattc

SEQ ID NO: 2557 - DNA, 20 bp, Artificial Sequence
  Synthetic: rene_2555_PRMT8
aagtccttgtactgtctgtc

SEQ ID NO: 2558 - DNA, 20 bp, Artificial Sequence
  Synthetic: rene_2556_PRR36
cctaggggacattgtcagga

SEQ ID NO: 2559 - DNA, 20 bp, Artificial Sequence
  Synthetic: rene_2557_PRR36
atcccctctgcagagtatgc

SEQ ID NO: 2560 - DNA, 20 bp, Artificial Sequence
  Synthetic: rene_2558_PRR36
ccttcctgcctcaccccctc

SEQ ID NO: 2561 - DNA, 20 bp, Artificial Sequence
  Synthetic: rene_2559_PRR36
gcctcaccgcctctgcaggc

SEQ ID NO: 2562 - DNA, 20 bp, Artificial Sequence
  Synthetic: rene_2560_PRR36
gctaagccccctccacaggc

SEQ ID NO: 2563 - DNA, 20 bp, Artificial Sequence
  Synthetic: rene_2561_PRR36
ggctcacccactctgcaggc

SEQ ID NO: 2564 - DNA, 20 bp, Artificial Sequence
  Synthetic: rene_2562_PRR36
tctccccctccctcaccccc

SEQ ID NO: 2565 - DNA, 20 bp, Artificial Sequence
  Synthetic: rene_2563_PRR36
gccacaccctctccatcggg

SEQ ID NO: 2566 - DNA, 20 bp, Artificial Sequence
  Synthetic: rene_2564_PSIP1
gctaaaacaggggttacttc

SEQ ID NO: 2567 - DNA, 20 bp, Artificial Sequence
  Synthetic: rene_2565_PSIP1
agtgtagtaatcatctctgt

SEQ ID NO: 2568 - DNA, 20 bp, Artificial Sequence
  Synthetic: rene_2566_PSIP1
ggaccaaaggatatatttcc

SEQ ID NO: 2569 - DNA, 20 bp, Artificial Sequence
  Synthetic: rene_2567_PSIP1
tgggagatagataacaatcc

SEQ ID NO: 2570 - DNA, 20 bp, Artificial Sequence
  Synthetic: rene_2568_PSIP1
gattaacagatgctgttgct

SEQ ID NO: 2571 - DNA, 20 bp, Artificial Sequence
  Synthetic: rene_2569_PSIP1
aaaggaagataccgaccatg

SEQ ID NO: 2572 - DNA, 20 bp, Artificial Sequence
  Synthetic: rene_2570_PSIP1
tgagtaaggaaatatatcct

SEQ ID NO: 2573 - DNA, 20 bp, Artificial Sequence
  Synthetic: rene_2571_PSIP1
atctcagcatgtatcctttg

SEQ ID NO: 2574 - DNA, 20 bp, Artificial Sequence
  Synthetic: rene_2572_PTGER2
ctggcatctgactgtgtaga

SEQ ID NO: 2575 - DNA, 20 bp, Artificial Sequence
  Synthetic: rene_2573_PTGER2
attaagaacacaagatgcaa

SEQ ID NO: 2576 - DNA, 20 bp, Artificial Sequence
  Synthetic: rene_2574_PTGER2
catatatgaatgaaacctct

SEQ ID NO: 2577 - DNA, 20 bp, Artificial Sequence
  Synthetic: rene_2575_PTGER2
gggaagaggtttcattcata

SEQ ID NO: 2578 - DNA, 20 bp, Artificial Sequence
  Synthetic: rene_2576_PTGER2
ctttcgggaagaggtttcat

SEQ ID NO: 2579 - DNA, 20 bp, Artificial Sequence
  Synthetic: rene_2577_PTGER2
gcctgggggaagccactgtc

SEQ ID NO: 2580 - DNA, 20 bp, Artificial Sequence
  Synthetic: rene_2578_PTGER2
gccatgaccttcttcagcct

SEQ ID NO: 2581 - DNA, 20 bp, Artificial Sequence
  Synthetic: rene_2579_PTGER2
tgttgcatcttgtgttctta

SEQ ID NO: 2582 - DNA, 20 bp, Artificial Sequence
  Synthetic: rene_2580_PTGER4
gagcgagaagtcagtaaaaa

SEQ ID NO: 2583 - DNA, 20 bp, Artificial Sequence
  Synthetic: rene_2581_PTGER4
actgaggtctggcagtgaga

SEQ ID NO: 2584 - DNA, 20 bp, Artificial Sequence
  Synthetic: rene_2582_PTGER4
actgggaaatgtgacttgca

SEQ ID NO: 2585 - DNA, 20 bp, Artificial Sequence
  Synthetic: rene_2583_PTGER4
ccagtgaaacactgaactta

SEQ ID NO: 2586 - DNA, 20 bp, Artificial Sequence
  Synthetic: rene_2584_PTGER4
tgataagttcagtgtttcac

SEQ ID NO: 2587 - DNA, 20 bp, Artificial Sequence
  Synthetic: rene_2585_PTGER4
ctgacttctcgctccaaact

SEQ ID NO: 2588 - DNA, 20 bp, Artificial Sequence
  Synthetic: rene_2586_PTGER4
tcaggaggatatatatccag

SEQ ID NO: 2589 - DNA, 20 bp, Artificial Sequence
  Synthetic: rene_2587_PTGER4
actgtctgagcagtgctgtc

SEQ ID NO: 2590 - DNA, 20 bp, Artificial Sequence
  Synthetic: rene_2588_PTPN11
atagactctagcactgtctt

SEQ ID NO: 2591 - DNA, 20 bp, Artificial Sequence
  Synthetic: rene_2589_PTPN11
ggaacgtcaatatcgcagtc

SEQ ID NO: 2592 - DNA, 20 bp, Artificial Sequence
  Synthetic: rene_2590_PTPN11
agattacatcaatgcaaata

SEQ ID NO: 2593 - DNA, 20 bp, Artificial Sequence
  Synthetic: rene_2591_PTPN11
tcccctccatacaggtcata

SEQ ID NO: 2594 - DNA, 20 bp, Artificial Sequence
  Synthetic: rene_2592_PTPN11
ttggaacaccatccgccaaa

SEQ ID NO: 2595 - DNA, 20 bp, Artificial Sequence
  Synthetic: rene_2593_PTPN11
gctgagttggtccagtatta

SEQ ID NO: 2596 - DNA, 20 bp, Artificial Sequence
  Synthetic: rene_2594_PTPN11
agttctcttagcgtatagtc

SEQ ID NO: 2597 - DNA, 20 bp, Artificial Sequence
  Synthetic: rene_2595_PTPN11
tctatatggcggtccagcat

SEQ ID NO: 2598 - DNA, 20 bp, Artificial Sequence
  Synthetic: rene_2596_PTPN13
gctggatcctgtatgacatc

SEQ ID NO: 2599 - DNA, 20 bp, Artificial Sequence
  Synthetic: rene_2597_PTPN13
gcatgatctcttgattaatt

SEQ ID NO: 2600 - DNA, 20 bp, Artificial Sequence
  Synthetic: rene_2598_PTPN13
gctgagagataacaagtgtc

SEQ ID NO: 2601 - DNA, 20 bp, Artificial Sequence
  Synthetic: rene_2599_PTPN13
gatgcagcccggagcagatt

SEQ ID NO: 2602 - DNA, 20 bp, Artificial Sequence
  Synthetic: rene_2600_PTPN13
cagtaaccaaaggcaatcag

SEQ ID NO: 2603 - DNA, 20 bp, Artificial Sequence
  Synthetic: rene_2601_PTPN13
actggaggtactaaagacat

SEQ ID NO: 2604 - DNA, 20 bp, Artificial Sequence
  Synthetic: rene_2602_PTPN13
ggtgaccaaacctggcagga

SEQ ID NO: 2605 - DNA, 20 bp, Artificial Sequence
  Synthetic: rene_2603_PTPN13
ccaccaactctgcaacggtt

SEQ ID NO: 2606 - DNA, 20 bp, Artificial Sequence
  Synthetic: rene_2604_PTPN6
gagaccttcgacagcctcac

SEQ ID NO: 2607 - DNA, 20 bp, Artificial Sequence
  Synthetic: rene_2605_PTPN6
accgagacctcagtgggctg

SEQ ID NO: 2608 - DNA, 20 bp, Artificial Sequence
  Synthetic: rene_2606_PTPN6
cagaagcaggaggtgaagaa

SEQ ID NO: 2609 - DNA, 20 bp, Artificial Sequence
  Synthetic: rene_2607_PTPN6
tgtgctcagtgaccagccca

SEQ ID NO: 2610 - DNA, 20 bp, Artificial Sequence
  Synthetic: rene_2608_PTPN6
tatgacctgtatggagggga

SEQ ID NO: 2611 - DNA, 20 bp, Artificial Sequence
  Synthetic: rene_2609_PTPN6
aatgaactgggcgatggcca

SEQ ID NO: 2612 - DNA, 20 bp, Artificial Sequence
  Synthetic: rene_2610_PTPN6
cgactctgacagagctggtg

SEQ ID NO: 2613 - DNA, 20 bp, Artificial Sequence
  Synthetic: rene_2611_PTPN6
ttgtgcgtgagagcctcagc

SEQ ID NO: 2614 - DNA, 20 bp, Artificial Sequence
  Synthetic: rene_2612_PWWP2B
gtgcagtccagcaggatccc

SEQ ID NO: 2615 - DNA, 20 bp, Artificial Sequence
  Synthetic: rene_2613_PWWP2B
gttctccgactacgtcgttc

SEQ ID NO: 2616 - DNA, 20 bp, Artificial Sequence
  Synthetic: rene_2614_PWWP2B
atcgtaagaagaaggggatg

SEQ ID NO: 2617 - DNA, 20 bp, Artificial Sequence
  Synthetic: rene_2615_PWWP2B
gcgagcctctctggacaccg

SEQ ID NO: 2618 - DNA, 20 bp, Artificial Sequence
  Synthetic: rene_2616_PWWP2B
cgatacatccccttcttctt

SEQ ID NO: 2619 - DNA, 20 bp, Artificial Sequence
  Synthetic: rene_2617_PWWP2B
aaactgggttaagagctccc

SEQ ID NO: 2620 - DNA, 20 bp, Artificial Sequence
  Synthetic: rene_2618_PWWP2B
aaatagacaagaacgacgta

SEQ ID NO: 2621 - DNA, 20 bp, Artificial Sequence
  Synthetic: rene_2619_PWWP2B
gcctacccccgttggctccg

SEQ ID NO: 2622 - DNA, 20 bp, Artificial Sequence
  Synthetic: rene_2620_PXDN
acatcagccctgaaggattc

SEQ ID NO: 2623 - DNA, 20 bp, Artificial Sequence
  Synthetic: rene_2621_PXDN
ggcgggaatctgtcttcatg

SEQ ID NO: 2624 - DNA, 20 bp, Artificial Sequence
  Synthetic: rene_2622_PXDN
gccacacgcttgtcaaccca

SEQ ID NO: 2625 - DNA, 20 bp, Artificial Sequence
  Synthetic: rene_2623_PXDN
cccgccaccccgaacagccc

SEQ ID NO: 2626 - DNA, 20 bp, Artificial Sequence
  Synthetic: rene_2624_PXDN
ctccgccctcttctgtaagc

SEQ ID NO: 2627 - DNA, 20 bp, Artificial Sequence
  Synthetic: rene_2625_PXDN
acagaatcagagagatccaa

SEQ ID NO: 2628 - DNA, 20 bp, Artificial Sequence
  Synthetic: rene_2626_PXDN
acagtcgcagtgaagtgtgt

SEQ ID NO: 2629 - DNA, 20 bp, Artificial Sequence
  Synthetic: rene_2627_PXDN
ccagcattcccagcgacaca

SEQ ID NO: 2630 - DNA, 20 bp, Artificial Sequence
  Synthetic: rene_2628_PYGO1
ctataaaccactaccttcgt

SEQ ID NO: 2631 - DNA, 20 bp, Artificial Sequence
  Synthetic: rene_2629_PYGO1
gttgctccttgagtaaagtc

SEQ ID NO: 2632 - DNA, 20 bp, Artificial Sequence
  Synthetic: rene_2630_PYGO1
ggtaatccatcttataataa

SEQ ID NO: 2633 - DNA, 20 bp, Artificial Sequence
  Synthetic: rene_2631_PYGO1
gaggctatagtacattcaga

SEQ ID NO: 2634 - DNA, 20 bp, Artificial Sequence
  Synthetic: rene_2632_PYGO1
agtcaaattcctccacagaa

SEQ ID NO: 2635 - DNA, 20 bp, Artificial Sequence
  Synthetic: rene_2633_PYGO1
gacaaaatcctgctgaaaat

SEQ ID NO: 2636 - DNA, 20 bp, Artificial Sequence
  Synthetic: rene_2634_PYGO1
ggggaggaataaaagaatga

SEQ ID NO: 2637 - DNA, 20 bp, Artificial Sequence
  Synthetic: rene_2635_PYGO1
tctagtacgcattaactgga

SEQ ID NO: 2638 - DNA, 20 bp, Artificial Sequence
  Synthetic: rene_2636_PYGO2
gtcccatgatctcacccacc

SEQ ID NO: 2639 - DNA, 20 bp, Artificial Sequence
  Synthetic: rene_2637_PYGO2
cccaggagccccactcaggc

SEQ ID NO: 2640 - DNA, 20 bp, Artificial Sequence
  Synthetic: rene_2638_PYGO2
ggggctccgaagtcatcttc

SEQ ID NO: 2641 - DNA, 20 bp, Artificial Sequence
  Synthetic: rene_2639_PYGO2
ccagccaacccttcaaccag

SEQ ID NO: 2642 - DNA, 20 bp, Artificial Sequence
  Synthetic: rene_2640_PYGO2
gtcctcccagtgggcagatg

SEQ ID NO: 2643 - DNA, 20 bp, Artificial Sequence
  Synthetic: rene_2641_PYGO2
aagatgacttcggagccccc

SEQ ID NO: 2644 - DNA, 20 bp, Artificial Sequence
  Synthetic: rene_2642_PYGO2
gcccttctcctctccagaga

SEQ ID NO: 2645 - DNA, 20 bp, Artificial Sequence
  Synthetic: rene_2643_PYGO2
tggcaggaggcctcacacag

SEQ ID NO: 2646 - DNA, 20 bp, Artificial Sequence
  Synthetic: rene_2644_RAC1
ccttgtgagtcctgcatcat

SEQ ID NO: 2647 - DNA, 20 bp, Artificial Sequence
  Synthetic: rene_2645_RAC1
catctaccataacattggca

SEQ ID NO: 2648 - DNA, 20 bp, Artificial Sequence
  Synthetic: rene_2646_RAC1
aaatgatgcaggactcacaa

SEQ ID NO: 2649 - DNA, 20 bp, Artificial Sequence
  Synthetic: rene_2647_RAC1
gttcccactaggatgatggg

SEQ ID NO: 2650 - DNA, 20 bp, Artificial Sequence
  Synthetic: rene_2648_RAC1
ccccgggaggttatatcctt

SEQ ID NO: 2651 - DNA, 20 bp, Artificial Sequence
  Synthetic: rene_2649_RAC1
acgaagcgatccgagcagtc

SEQ ID NO: 2652 - DNA, 20 bp, Artificial Sequence
  Synthetic: rene_2650_RAC1
cggataggatagggggcgta

SEQ ID NO: 2653 - DNA, 20 bp, Artificial Sequence
  Synthetic: rene_2651_RAC1
tcatccctaagatcaagttt

SEQ ID NO: 2654 - DNA, 20 bp, Artificial Sequence
  Synthetic: rene_2652_RAG2
ggaggacattcacttgccaa

SEQ ID NO: 2655 - DNA, 20 bp, Artificial Sequence
  Synthetic: rene_2653_RAG2
ggtgtgctacatcatacatt

SEQ ID NO: 2656 - DNA, 20 bp, Artificial Sequence
  Synthetic: rene_2654_RAG2
cctcggctgtacaccacatt

SEQ ID NO: 2657 - DNA, 20 bp, Artificial Sequence
  Synthetic: rene_2655_RAG2
ccatgttgcttccaaaccat

SEQ ID NO: 2658 - DNA, 20 bp, Artificial Sequence
  Synthetic: rene_2656_RAG2
gctgcacagagaaagacttg

SEQ ID NO: 2659 - DNA, 20 bp, Artificial Sequence
  Synthetic: rene_2657_RAG2
gcaatagagacatgaaaaga

SEQ ID NO: 2660 - DNA, 20 bp, Artificial Sequence
  Synthetic: rene_2658_RAG2
gaagcaacatgggaaatgga

SEQ ID NO: 2661 - DNA, 20 bp, Artificial Sequence
  Synthetic: rene_2659_RAG2
cctccatggatgatgtattg

SEQ ID NO: 2662 - DNA, 20 bp, Artificial Sequence
  Synthetic: rene_2660_RAI1
cctacagccagcagccgctc

SEQ ID NO: 2663 - DNA, 20 bp, Artificial Sequence
  Synthetic: rene_2661_RAI1
gcagaggcagcaaacaaggc

SEQ ID NO: 2664 - DNA, 20 bp, Artificial Sequence
  Synthetic: rene_2662_RAI1
catggcaaacaacagaacta

SEQ ID NO: 2665 - DNA, 20 bp, Artificial Sequence
  Synthetic: rene_2663_RAI1
gtgcgtgaccgaaggatcat

SEQ ID NO: 2666 - DNA, 20 bp, Artificial Sequence
  Synthetic: rene_2664_RAI1
ccatggaaaccacacctttc

SEQ ID NO: 2667 - DNA, 20 bp, Artificial Sequence
  Synthetic: rene_2665_RAI1
caaggccctgagtacctctt

SEQ ID NO: 2668 - DNA, 20 bp, Artificial Sequence
  Synthetic: rene_2666_RAI1
ctgcgaggtctgctggtagt

SEQ ID NO: 2669 - DNA, 20 bp, Artificial Sequence
  Synthetic: rene_2667_RAI1
tgcataacggatcagcccca

SEQ ID NO: 2670 - DNA, 20 bp, Artificial Sequence
  Synthetic: rene_2668_RBPJ
ccttaaggatacagaaagaa

SEQ ID NO: 2671 - DNA, 20 bp, Artificial Sequence
  Synthetic: rene_2669_RBPJ
ggtggaggccgctcaccaaa

SEQ ID NO: 2672 - DNA, 20 bp, Artificial Sequence
  Synthetic: rene_2670_RBPJ
gggatgtagaagctgaaact

SEQ ID NO: 2673 - DNA, 20 bp, Artificial Sequence
  Synthetic: rene_2671_RBPJ
gcttgtctgagtcagatata

SEQ ID NO: 2674 - DNA, 20 bp, Artificial Sequence
  Synthetic: rene_2672_RBPJ
gtgagcggcctccacctaaa

SEQ ID NO: 2675 - DNA, 20 bp, Artificial Sequence
  Synthetic: rene_2673_RBPJ
cccacctccttgtgtatatc

SEQ ID NO: 2676 - DNA, 20 bp, Artificial Sequence
  Synthetic: rene_2674_RBPJ
agcttctacatccccaaacc

SEQ ID NO: 2677 - DNA, 20 bp, Artificial Sequence
  Synthetic: rene_2675_RBPJ
ggaccaaagttactggaacc

SEQ ID NO: 2678 - DNA, 20 bp, Artificial Sequence
  Synthetic: rene_2676_RCN1
ctgggaagaatacaaacaag

SEQ ID NO: 2679 - DNA, 20 bp, Artificial Sequence
  Synthetic: rene_2677_RCN1
ccatgaggagaatggccctg

SEQ ID NO: 2680 - DNA, 20 bp, Artificial Sequence
  Synthetic: rene_2678_RCN1
aaggtgtgatgatctgaaga

SEQ ID NO: 2681 - DNA, 20 bp, Artificial Sequence
  Synthetic: rene_2679_RCN1
agctcctcagtagtgacaaa

SEQ ID NO: 2682 - DNA, 20 bp, Artificial Sequence
  Synthetic: rene_2680_RCN1
tcggaagccaagctaccaat

SEQ ID NO: 2683 - DNA, 20 bp, Artificial Sequence
  Synthetic: rene_2681_RCN1
tcatccttgtccctatcata

SEQ ID NO: 2684 - DNA, 20 bp, Artificial Sequence
  Synthetic: rene_2682_RCN1
atgattcttcagatcatcac

SEQ ID NO: 2685 - DNA, 20 bp, Artificial Sequence
  Synthetic: rene_2683_RCN1
cttcatatgttcaaactctt

SEQ ID NO: 2686 - DNA, 20 bp, Artificial Sequence
  Synthetic: rene_2684_RGS16
ctgccccactcgaacttgcc

SEQ ID NO: 2687 - DNA, 20 bp, Artificial Sequence
  Synthetic: rene_2685_RGS16
ggggcctcactgcaaatgaa

SEQ ID NO: 2688 - DNA, 20 bp, Artificial Sequence
  Synthetic: rene_2686_RGS16
ctgctcagcagcaggtcgaa

SEQ ID NO: 2689 - DNA, 20 bp, Artificial Sequence
  Synthetic: rene_2687_RGS16
ctgaagacagagttcagtga

SEQ ID NO: 2690 - DNA, 20 bp, Artificial Sequence
  Synthetic: rene_2688_RGS16
tgaagaaagatccccagacg

SEQ ID NO: 2691 - DNA, 20 bp, Artificial Sequence
  Synthetic: rene_2689_RGS16
atgcggctcaggggaagaca

SEQ ID NO: 2692 - DNA, 20 bp, Artificial Sequence
  Synthetic: rene_2690_RGS16
ctgtgtttactgccccactc

SEQ ID NO: 2693 - DNA, 20 bp, Artificial Sequence
  Synthetic: rene_2691_RGS16
ttcacaaatcagagctgggc

SEQ ID NO: 2694 - DNA, 20 bp, Artificial Sequence
  Synthetic: rene_2692_RIOX1
ggaggggtctgccccgagac

SEQ ID NO: 2695 - DNA, 20 bp, Artificial Sequence
  Synthetic: rene_2693_RIOX1
gctgtgcttcaagagcagtt

SEQ ID NO: 2696 - DNA, 20 bp, Artificial Sequence
  Synthetic: rene_2694_RIOX1
cctcacgccccctaactcgc

SEQ ID NO: 2697 - DNA, 20 bp, Artificial Sequence
  Synthetic: rene_2695_RIOX1
actgatagggagagggcact

SEQ ID NO: 2698 - DNA, 20 bp, Artificial Sequence
  Synthetic: rene_2696_RIOX1
cactgtgtaatagagaaaca

SEQ ID NO: 2699 - DNA, 20 bp, Artificial Sequence
  Synthetic: rene_2697_RIOX1
gaagcatggcaggctccaac

SEQ ID NO: 2700 - DNA, 20 bp, Artificial Sequence
  Synthetic: rene_2698_RIOX1
tctaccgctgacctggattc

SEQ ID NO: 2701 - DNA, 20 bp, Artificial Sequence
  Synthetic: rene_2699_RIOX1
ctaccttccagctgcagcac

SEQ ID NO: 2702 - DNA, 20 bp, Artificial Sequence
  Synthetic: rene_2700_RIOX2
aagaccacattgtcctcaca

SEQ ID NO: 2703 - DNA, 20 bp, Artificial Sequence
  Synthetic: rene_2701_RIOX2
ccatcatgtgtgtctctcta

SEQ ID NO: 2704 - DNA, 20 bp, Artificial Sequence
  Synthetic: rene_2702_RIOX2
atctcgcccatcaagacaga

SEQ ID NO: 2705 - DNA, 20 bp, Artificial Sequence
  Synthetic: rene_2703_RIOX2
tgtcaaggacctgaaactta

SEQ ID NO: 2706 - DNA, 20 bp, Artificial Sequence
  Synthetic: rene_2704_RIOX2
gaggatccaggagaagctgg

SEQ ID NO: 2707 - DNA, 20 bp, Artificial Sequence
  Synthetic: rene_2705_RIOX2
gatgcactgaagcaaatttg

SEQ ID NO: 2708 - DNA, 20 bp, Artificial Sequence
  Synthetic: rene_2706_RIOX2
aataaagatggcaaagcaca

SEQ ID NO: 2709 - DNA, 20 bp, Artificial Sequence
  Synthetic: rene_2707_RIOX2
ccagaggaaccattcatcaa

SEQ ID NO: 2710 - DNA, 20 bp, Artificial Sequence
  Synthetic: rene_2708_RNF11
tgccgtgcatgcacatctat

SEQ ID NO: 2711 - DNA, 20 bp, Artificial Sequence
  Synthetic: rene_2709_RNF11
tggggacccaattcgatttc

SEQ ID NO: 2712 - DNA, 20 bp, Artificial Sequence
  Synthetic: rene_2710_RNF11
ggcagatgttgtataagacc

SEQ ID NO: 2713 - DNA, 20 bp, Artificial Sequence
  Synthetic: rene_2711_RNF11
tgatccatctcttccagggt

SEQ ID NO: 2714 - DNA, 20 bp, Artificial Sequence
  Synthetic: rene_2712_RNF11
tgaccctggaagagatggat

SEQ ID NO: 2715 - DNA, 20 bp, Artificial Sequence
  Synthetic: rene_2713_RNF11
gcgaggggacggagccggat

SEQ ID NO: 2716 - DNA, 20 bp, Artificial Sequence
  Synthetic: rene_2714_RNF11
ttcctcttcagtcagctgag

SEQ ID NO: 2717 - DNA, 20 bp, Artificial Sequence
  Synthetic: rene_2715_RNF11
agctatcctaatttgttcct

SEQ ID NO: 2718 - DNA, 20 bp, Artificial Sequence
  Synthetic: rene_2716_RNF17
ggtactacaaatatagttcc

SEQ ID NO: 2719 - DNA, 20 bp, Artificial Sequence
  Synthetic: rene_2717_RNF17
agttaacaaccactgaacat

SEQ ID NO: 2720 - DNA, 20 bp, Artificial Sequence
  Synthetic: rene_2718_RNF17
cttagaaccagacataaatc

SEQ ID NO: 2721 - DNA, 20 bp, Artificial Sequence
  Synthetic: rene_2719_RNF17
agtgaatccatgatctaaat

SEQ ID NO: 2722 - DNA, 20 bp, Artificial Sequence
  Synthetic: rene_2720_RNF17
gctacacaggcttgatcttg

SEQ ID NO: 2723 - DNA, 20 bp, Artificial Sequence
  Synthetic: rene_2721_RNF17
aatgcagctatgaacatagc

SEQ ID NO: 2724 - DNA, 20 bp, Artificial Sequence
  Synthetic: rene_2722_RNF17
cttgaagacagtctatcata

SEQ ID NO: 2725 - DNA, 20 bp, Artificial Sequence
  Synthetic: rene_2723_RNF17
gcttcctcttcccagccttc

SEQ ID NO: 2726 - DNA, 20 bp, Artificial Sequence
  Synthetic: rene_2724_RPH3A
agacactcgtaccagtgttt

SEQ ID NO: 2727 - DNA, 20 bp, Artificial Sequence
  Synthetic: rene_2725_RPH3A
agacgggccaactcagtcca

SEQ ID NO: 2728 - DNA, 20 bp, Artificial Sequence
  Synthetic: rene_2726_RPH3A
ttgagggagaatctggtctc

SEQ ID NO: 2729 - DNA, 20 bp, Artificial Sequence
  Synthetic: rene_2727_RPH3A
tatgacatcaaacacagtga

SEQ ID NO: 2730 - DNA, 20 bp, Artificial Sequence
  Synthetic: rene_2728_RPH3A
agcgctctcccttggcagag

SEQ ID NO: 2731 - DNA, 20 bp, Artificial Sequence
  Synthetic: rene_2729_RPH3A
gggaagcctttgaagaacca

SEQ ID NO: 2732 - DNA, 20 bp, Artificial Sequence
  Synthetic: rene_2730_RPH3A
agtctgggactatgacatcg

SEQ ID NO: 2733 - DNA, 20 bp, Artificial Sequence
  Synthetic: rene_2731_RPH3A
ttggtgagaccagattctcc

SEQ ID NO: 2734 - DNA, 20 bp, Artificial Sequence
  Synthetic: rene_2732_RSF1
gatgaagaaagaaaagaaaa

SEQ ID NO: 2735 - DNA, 20 bp, Artificial Sequence
  Synthetic: rene_2733_RSF1
agacagaaccaatagagaca

SEQ ID NO: 2736 - DNA, 20 bp, Artificial Sequence
  Synthetic: rene_2734_RSF1
actatggatctctaagactg

SEQ ID NO: 2737 - DNA, 20 bp, Artificial Sequence
  Synthetic: rene_2735_RSF1
acagtagtctcttctagaac

SEQ ID NO: 2738 - DNA, 20 bp, Artificial Sequence
  Synthetic: rene_2736_RSF1
ccttcatgacccaaagcagt

SEQ ID NO: 2739 - DNA, 20 bp, Artificial Sequence
  Synthetic: rene_2737_RSF1
gatgttgccttaaagaagaa

SEQ ID NO: 2740 - DNA, 20 bp, Artificial Sequence
  Synthetic: rene_2738_RSF1
actgccagacccttcacttt

SEQ ID NO: 2741 - DNA, 20 bp, Artificial Sequence
  Synthetic: rene_2739_RSF1
atcagacacaacaaactcat

SEQ ID NO: 2742 - DNA, 20 bp, Artificial Sequence
  Synthetic: rene_2740_RYR1
gccggagtggacaagaaata

SEQ ID NO: 2743 - DNA, 20 bp, Artificial Sequence
  Synthetic: rene_2741_RYR1
gtgaggaaccgcctgaagaa

SEQ ID NO: 2744 - DNA, 20 bp, Artificial Sequence
  Synthetic: rene_2742_RYR1
aatggaagacgagtccagtt

SEQ ID NO: 2745 - DNA, 20 bp, Artificial Sequence
  Synthetic: rene_2743_RYR1
gtgagctccgagaccaacaa

SEQ ID NO: 2746 - DNA, 20 bp, Artificial Sequence
  Synthetic: rene_2744_RYR1
ggagcctgagtcagacatga

SEQ ID NO: 2747 - DNA, 20 bp, Artificial Sequence
  Synthetic: rene_2745_RYR1
cgtatgacgcccctgtacaa

SEQ ID NO: 2748 - DNA, 20 bp, Artificial Sequence
  Synthetic: rene_2746_RYR1
ccctgctgacagtgatgacc

SEQ ID NO: 2749 - DNA, 20 bp, Artificial Sequence
  Synthetic: rene_2747_RYR1
tctgccttagatgagtatga

SEQ ID NO: 2750 - DNA, 20 bp, Artificial Sequence
  Synthetic: rene_2748_SCMH1
cctgggacaaatacctaaaa

SEQ ID NO: 2751 - DNA, 20 bp, Artificial Sequence
  Synthetic: rene_2749_SCMH1
tggtgataagcacagtcgat

SEQ ID NO: 2752 - DNA, 20 bp, Artificial Sequence
  Synthetic: rene_2750_SCMH1
agctgagtcaaccagccgcc

SEQ ID NO: 2753 - DNA, 20 bp, Artificial Sequence
  Synthetic: rene_2751_SCMH1
accgggaacagcataccctc

SEQ ID NO: 2754 - DNA, 20 bp, Artificial Sequence
  Synthetic: rene_2752_SCMH1
gtttccaaaatgattccata

SEQ ID NO: 2755 - DNA, 20 bp, Artificial Sequence
  Synthetic: rene_2753_SCMH1
ccatcccatctctgccccat

SEQ ID NO: 2756 - DNA, 20 bp, Artificial Sequence
  Synthetic: rene_2754_SCMH1
acagttcccaataggctgga

SEQ ID NO: 2757 - DNA, 20 bp, Artificial Sequence
  Synthetic: rene_2755_SCMH1
gcttgtgagattctctggga

SEQ ID NO: 2758 - DNA, 20 bp, Artificial Sequence
  Synthetic: rene_2756_SCML2
acatgtcccaacaggttgta

SEQ ID NO: 2759 - DNA, 20 bp, Artificial Sequence
  Synthetic: rene_2757_SCML2
gagaagctgcagatgtagaa

SEQ ID NO: 2760 - DNA, 20 bp, Artificial Sequence
  Synthetic: rene_2758_SCML2
catggcccagaagcgacatc

SEQ ID NO: 2761 - DNA, 20 bp, Artificial Sequence
  Synthetic: rene_2759_SCML2
aatgtagtaacacagcttta

SEQ ID NO: 2762 - DNA, 20 bp, Artificial Sequence
  Synthetic: rene_2760_SCML2
gtttcaagggcacaatccac

SEQ ID NO: 2763 - DNA, 20 bp, Artificial Sequence
  Synthetic: rene_2761_SCML2
gtgatgagctcttagaatct

SEQ ID NO: 2764 - DNA, 20 bp, Artificial Sequence
  Synthetic: rene_2762_SCML2
gatacctgaagccagataat

SEQ ID NO: 2765 - DNA, 20 bp, Artificial Sequence
  Synthetic: rene_2763_SCML2
ataccaactttgaaatcatt

SEQ ID NO: 2766 - DNA, 20 bp, Artificial Sequence
  Synthetic: rene_2764_SEC61A2
gctccagctaacaactgcat

SEQ ID NO: 2767 - DNA, 20 bp, Artificial Sequence
  Synthetic: rene_2765_SEC61A2
ggtgtatctccaacttcaat

SEQ ID NO: 2768 - DNA, 20 bp, Artificial Sequence
  Synthetic: rene_2766_SEC61A2
gctgaggaaccagacacttc

SEQ ID NO: 2769 - DNA, 20 bp, Artificial Sequence
  Synthetic: rene_2767_SEC61A2
gaagttatcaaaccattctg

SEQ ID NO: 2770 - DNA, 20 bp, Artificial Sequence
  Synthetic: rene_2768_SEC61A2
atggggtagctgctgtactg

SEQ ID NO: 2771 - DNA, 20 bp, Artificial Sequence
  Synthetic: rene_2769_SEC61A2
ccagatgctgtctgttcgat

SEQ ID NO: 2772 - DNA, 20 bp, Artificial Sequence
  Synthetic: rene_2770_SEC61A2
gagagaaggttctgtggact

SEQ ID NO: 2773 - DNA, 20 bp, Artificial Sequence
  Synthetic: rene_2771_SEC61A2
caaaaaggatactcttctac

SEQ ID NO: 2774 - DNA, 20 bp, Artificial Sequence
  Synthetic: rene_2772_SEPT1
acacccccttcctcaatctc

SEQ ID NO: 2775 - DNA, 20 bp, Artificial Sequence
  Synthetic: rene_2773_SEPT1
ctggggcatcagagcatccg

SEQ ID NO: 2776 - DNA, 20 bp, Artificial Sequence
  Synthetic: rene_2774_SEPT1
ctgaacctgcgacggatgct

SEQ ID NO: 2777 - DNA, 20 bp, Artificial Sequence
  Synthetic: rene_2775_SEPT1
ggcctgcatcttctccagca

SEQ ID NO: 2778 - DNA, 20 bp, Artificial Sequence
  Synthetic: rene_2776_SEPT1
ctgccctccccaaccagctg

SEQ ID NO: 2779 - DNA, 20 bp, Artificial Sequence
  Synthetic: rene_2777_SEPT1
ccgccagagcgccacagaga

SEQ ID NO: 2780 - DNA, 20 bp, Artificial Sequence
  Synthetic: rene_2778_SEPT1
gggactcagtggactgctct

SEQ ID NO: 2781 - DNA, 20 bp, Artificial Sequence
  Synthetic: rene_2779_SEPT1
agcagtaccttagggatgag

SEQ ID NO: 2782 - DNA, 20 bp, Artificial Sequence
  Synthetic: rene_2780_SERPINA1
cccaaactgtccattactgg

SEQ ID NO: 2783 - DNA, 20 bp, Artificial Sequence
  Synthetic: rene_2781_SERPINA1
aagtcaaggacaccgaggaa

SEQ ID NO: 2784 - DNA, 20 bp, Artificial Sequence
  Synthetic: rene_2782_SERPINA1
ggcatgtttaacatccagca

SEQ ID NO: 2785 - DNA, 20 bp, Artificial Sequence
  Synthetic: rene_2783_SERPINA1
acatccagcactgtaagaag

SEQ ID NO: 2786 - DNA, 20 bp, Artificial Sequence
  Synthetic: rene_2784_SERPINA1
atcagcagcacccagctgga

SEQ ID NO: 2787 - DNA, 20 bp, Artificial Sequence
  Synthetic: rene_2785_SERPINA1
ccctcatcaggcaggaagaa

SEQ ID NO: 2788 - DNA, 20 bp, Artificial Sequence
  Synthetic: rene_2786_SERPINA1
caggtgctgtagtttcccct

SEQ ID NO: 2789 - DNA, 20 bp, Artificial Sequence
  Synthetic: rene_2787_SERPINA1
caggaacttggtgatgatat

SEQ ID NO: 2790 - DNA, 20 bp, Artificial Sequence
  Synthetic: rene_2788_SETD1A
gccatctgagtcagcataca

SEQ ID NO: 2791 - DNA, 20 bp, Artificial Sequence
  Synthetic: rene_2789_SETD1A
ccatggaacccattgctgct

SEQ ID NO: 2792 - DNA, 20 bp, Artificial Sequence
  Synthetic: rene_2790_SETD1A
gtagttctgatgcaaactac

SEQ ID NO: 2793 - DNA, 20 bp, Artificial Sequence
  Synthetic: rene_2791_SETD1A
gggagccccggcagctctct

SEQ ID NO: 2794 - DNA, 20 bp, Artificial Sequence
  Synthetic: rene_2792_SETD1A
gccggagccggatccacgag

SEQ ID NO: 2795 - DNA, 20 bp, Artificial Sequence
  Synthetic: rene_2793_SETD1A
agcaggtcactgtccatgat

SEQ ID NO: 2796 - DNA, 20 bp, Artificial Sequence
  Synthetic: rene_2794_SETD1A
ccggcccagcctcccgcaag

SEQ ID NO: 2797 - DNA, 20 bp, Artificial Sequence
  Synthetic: rene_2795_SETD1A
aacagatgaccatcctgtat

SEQ ID NO: 2798 - DNA, 20 bp, Artificial Sequence
  Synthetic: rene_2796_SETD2
gtggtaaaaaacccaaccct

SEQ ID NO: 2799 - DNA, 20 bp, Artificial Sequence
  Synthetic: rene_2797_SETD2
gaagaacacgtaactcaaat

SEQ ID NO: 2800 - DNA, 20 bp, Artificial Sequence
  Synthetic: rene_2798_SETD2
agaggccctctatctttgat

SEQ ID NO: 2801 - DNA, 20 bp, Artificial Sequence
  Synthetic: rene_2799_SETD2
ggtgacccagagggtcagat

SEQ ID NO: 2802 - DNA, 20 bp, Artificial Sequence
  Synthetic: rene_2800_SETD2
gtaggaatgggcaagtgttc

SEQ ID NO: 2803 - DNA, 20 bp, Artificial Sequence
  Synthetic: rene_2801_SETD2
cctcctgctgctctgatgct

SEQ ID NO: 2804 - DNA, 20 bp, Artificial Sequence
  Synthetic: rene_2802_SETD2
gctgtgaatgaaaagaaaga

SEQ ID NO: 2805 - DNA, 20 bp, Artificial Sequence
  Synthetic: rene_2803_SETD2
agagaaaacagcatgcagat

SEQ ID NO: 2806 - DNA, 20 bp, Artificial Sequence
  Synthetic: rene_2804_SETD3
gtggaacccataaaaacaat

SEQ ID NO: 2807 - DNA, 20 bp, Artificial Sequence
  Synthetic: rene_2805_SETD3
attagatcaggaaagtaatc

SEQ ID NO: 2808 - DNA, 20 bp, Artificial Sequence
  Synthetic: rene_2806_SETD3
atggaaaaagagaagattac

SEQ ID NO: 2809 - DNA, 20 bp, Artificial Sequence
  Synthetic: rene_2807_SETD3
agaggcccatttcattagat

SEQ ID NO: 2810 - DNA, 20 bp, Artificial Sequence
  Synthetic: rene_2808_SETD3
gtttgagagcaacaagagat

SEQ ID NO: 2811 - DNA, 20 bp, Artificial Sequence
  Synthetic: rene_2809_SETD3
ccgagccgcccatctctgct

SEQ ID NO: 2812 - DNA, 20 bp, Artificial Sequence
  Synthetic: rene_2810_SETD3
ggacctggtcccattaggga

SEQ ID NO: 2813 - DNA, 20 bp, Artificial Sequence
  Synthetic: rene_2811_SETD3
gaaaaagcagtaaagagtgc

SEQ ID NO: 2814 - DNA, 20 bp, Artificial Sequence
  Synthetic: rene_2812_SETD4
cccaaggcgtatacctgccc

SEQ ID NO: 2815 - DNA, 20 bp, Artificial Sequence
  Synthetic: rene_2813_SETD4
gacatagcccagaaaatatg

SEQ ID NO: 2816 - DNA, 20 bp, Artificial Sequence
  Synthetic: rene_2814_SETD4
atagaagagactaatgctgt

SEQ ID NO: 2817 - DNA, 20 bp, Artificial Sequence
  Synthetic: rene_2815_SETD4
agatacgaatgagaagacaa

SEQ ID NO: 2818 - DNA, 20 bp, Artificial Sequence
  Synthetic: rene_2816_SETD4
gtggaatccttgtggacgga

SEQ ID NO: 2819 - DNA, 20 bp, Artificial Sequence
  Synthetic: rene_2817_SETD4
gatgggatggaccatcttgg

SEQ ID NO: 2820 - DNA, 20 bp, Artificial Sequence
  Synthetic: rene_2818_SETD4
ggaagaaggttcaccacttc

SEQ ID NO: 2821 - DNA, 20 bp, Artificial Sequence
  Synthetic: rene_2819_SETD4
actcatcagccctcttcctg

SEQ ID NO: 2822 - DNA, 20 bp, Artificial Sequence
  Synthetic: rene_2820_SETD5
gcagccagccacattctgga

SEQ ID NO: 2823 - DNA, 20 bp, Artificial Sequence
  Synthetic: rene_2821_SETD5
tcctgaactgtctagacttc

SEQ ID NO: 2824 - DNA, 20 bp, Artificial Sequence
  Synthetic: rene_2822_SETD5
ccttgtgacaggcacagtcc

SEQ ID NO: 2825 - DNA, 20 bp, Artificial Sequence
  Synthetic: rene_2823_SETD5
ccagccctcagttgtattct

SEQ ID NO: 2826 - DNA, 20 bp, Artificial Sequence
  Synthetic: rene_2824_SETD5
tcagtccagcacaggaactc

SEQ ID NO: 2827 - DNA, 20 bp, Artificial Sequence
  Synthetic: rene_2825_SETD5
ggaaccaataactgtgttat

SEQ ID NO: 2828 - DNA, 20 bp, Artificial Sequence
  Synthetic: rene_2826_SETD5
gctttggacactcttataat

SEQ ID NO: 2829 - DNA, 20 bp, Artificial Sequence
  Synthetic: rene_2827_SETD5
gtaactcctactgaagctgg

SEQ ID NO: 2830 - DNA, 20 bp, Artificial Sequence
  Synthetic: rene_2828_SETD6
gtatgtctgcagcaggcacc

SEQ ID NO: 2831 - DNA, 20 bp, Artificial Sequence
  Synthetic: rene_2829_SETD6
ctatgcaaactggagatggt

SEQ ID NO: 2832 - DNA, 20 bp, Artificial Sequence
  Synthetic: rene_2830_SETD6
cccataagtgttgaaaatct

SEQ ID NO: 2833 - DNA, 20 bp, Artificial Sequence
  Synthetic: rene_2831_SETD6
agtctgtggcataggtctgc

SEQ ID NO: 2834 - DNA, 20 bp, Artificial Sequence
  Synthetic: rene_2832_SETD6
gcatagacttccttattact

SEQ ID NO: 2835 - DNA, 20 bp, Artificial Sequence
  Synthetic: rene_2833_SETD6
tcatctccccctccatcctg

SEQ ID NO: 2836 - DNA, 20 bp, Artificial Sequence
  Synthetic: rene_2834_SETD6
cataggaaatcccagcgctc

SEQ ID NO: 2837 - DNA, 20 bp, Artificial Sequence
  Synthetic: rene_2835_SETD6
ctcagtaataaggaagtcta

SEQ ID NO: 2838 - DNA, 20 bp, Artificial Sequence
  Synthetic: rene_2836_SETD7
ccttctatcatctctccatc

SEQ ID NO: 2839 - DNA, 20 bp, Artificial Sequence
  Synthetic: rene_2837_SETD7
ccataaagtgcggtcctctc

SEQ ID NO: 2840 - DNA, 20 bp, Artificial Sequence
  Synthetic: rene_2838_SETD7
gagtgaaggagtgatttgcc

SEQ ID NO: 2841 - DNA, 20 bp, Artificial Sequence
  Synthetic: rene_2839_SETD7
aaaggtagctgtgggaccta

SEQ ID NO: 2842 - DNA, 20 bp, Artificial Sequence
  Synthetic: rene_2840_SETD7
ggcccatcaaatgcatccgc

SEQ ID NO: 2843 - DNA, 20 bp, Artificial Sequence
  Synthetic: rene_2841_SETD7
ggagtggagccccaaatctg

SEQ ID NO: 2844 - DNA, 20 bp, Artificial Sequence
  Synthetic: rene_2842_SETD7
ccttgtgtcccaaggaggca

SEQ ID NO: 2845 - DNA, 20 bp, Artificial Sequence
  Synthetic: rene_2843_SETD7
gggctccactcccaaagatc

SEQ ID NO: 2846 - DNA, 20 bp, Artificial Sequence
  Synthetic: rene_2844_SETDB1
gatgcagcaacagctacagt

SEQ ID NO: 2847 - DNA, 20 bp, Artificial Sequence
  Synthetic: rene_2845_SETDB1
gtgtctcagctacaatgcca

SEQ ID NO: 2848 - DNA, 20 bp, Artificial Sequence
  Synthetic: rene_2846_SETDB1
ggtccacaagaacatatgga

SEQ ID NO: 2849 - DNA, 20 bp, Artificial Sequence
  Synthetic: rene_2847_SETDB1
gcgaccacccgactgcccac

SEQ ID NO: 2850 - DNA, 20 bp, Artificial Sequence
  Synthetic: rene_2848_SETDB1
actgagtgcaggagatgtag

SEQ ID NO: 2851 - DNA, 20 bp, Artificial Sequence
  Synthetic: rene_2849_SETDB1
atgtctccctcatccttgat

SEQ ID NO: 2852 - DNA, 20 bp, Artificial Sequence
  Synthetic: rene_2850_SETDB1
attgcaatcccatgggttga

SEQ ID NO: 2853 - DNA, 20 bp, Artificial Sequence
  Synthetic: rene_2851_SETDB1
gagactggctgtgacttcct

SEQ ID NO: 2854 - DNA, 20 bp, Artificial Sequence
  Synthetic: rene_2852_SETDB2
cctctacatcatgtgaaaac

SEQ ID NO: 2855 - DNA, 20 bp, Artificial Sequence
  Synthetic: rene_2853_SETDB2
gttatatctatcacatctga

SEQ ID NO: 2856 - DNA, 20 bp, Artificial Sequence
  Synthetic: rene_2854_SETDB2
agtgttagctctgcttagta

SEQ ID NO: 2857 - DNA, 20 bp, Artificial Sequence
  Synthetic: rene_2855_SETDB2
acttagcaactcttcatcac

SEQ ID NO: 2858 - DNA, 20 bp, Artificial Sequence
  Synthetic: rene_2856_SETDB2
atcagacaagcaccagagca

SEQ ID NO: 2859 - DNA, 20 bp, Artificial Sequence
  Synthetic: rene_2857_SETDB2
acatgatgtagagggaaatg

SEQ ID NO: 2860 - DNA, 20 bp, Artificial Sequence
  Synthetic: rene_2858_SETDB2
gtagactccttccacaaggg

SEQ ID NO: 2861 - DNA, 20 bp, Artificial Sequence
  Synthetic: rene_2859_SETDB2
ctcggagtctgtcactccag

SEQ ID NO: 2862 - DNA, 20 bp, Artificial Sequence
  Synthetic: rene_2860_SETMAR
cctcatccaccgtattcacc

SEQ ID NO: 2863 - DNA, 20 bp, Artificial Sequence
  Synthetic: rene_2861_SETMAR
cgctacaggaataaaccaac

SEQ ID NO: 2864 - DNA, 20 bp, Artificial Sequence
  Synthetic: rene_2862_SETMAR
tacggggcagtacagagaac

SEQ ID NO: 2865 - DNA, 20 bp, Artificial Sequence
  Synthetic: rene_2863_SETMAR
ctatataagtagggtcaaca

SEQ ID NO: 2866 - DNA, 20 bp, Artificial Sequence
  Synthetic: rene_2864_SETMAR
cctgcaaaaagttgttgaga

SEQ ID NO: 2867 - DNA, 20 bp, Artificial Sequence
  Synthetic: rene_2865_SETMAR
gctcacaagaatgattaagg

SEQ ID NO: 2868 - DNA, 20 bp, Artificial Sequence
  Synthetic: rene_2866_SETMAR
ggattctctgaagttcagag

SEQ ID NO: 2869 - DNA, 20 bp, Artificial Sequence
  Synthetic: rene_2867_SETMAR
ctgagcatacttctcagatg

SEQ ID NO: 2870 - DNA, 20 bp, Artificial Sequence
  Synthetic: rene_2868_SFMBT1
acaccagcccaaaggaaata

SEQ ID NO: 2871 - DNA, 20 bp, Artificial Sequence
  Synthetic: rene_2869_SFMBT1
agggcacaagctaagttact

SEQ ID NO: 2872 - DNA, 20 bp, Artificial Sequence
  Synthetic: rene_2870_SFMBT1
cagagaatgtatgaatgcca

SEQ ID NO: 2873 - DNA, 20 bp, Artificial Sequence
  Synthetic: rene_2871_SFMBT1
actatctcaacagtagcccg

SEQ ID NO: 2874 - DNA, 20 bp, Artificial Sequence
  Synthetic: rene_2872_SFMBT1
ggatctctcctgctacagtt

SEQ ID NO: 2875 - DNA, 20 bp, Artificial Sequence
  Synthetic: rene_2873_SFMBT1
actgggctgactacctcaaa

SEQ ID NO: 2876 - DNA, 20 bp, Artificial Sequence
  Synthetic: rene_2874_SFMBT1
ggtgggagaagaggagcatg

SEQ ID NO: 2877 - DNA, 20 bp, Artificial Sequence
  Synthetic: rene_2875_SFMBT1
aggtagtcagcccagtcaaa

SEQ ID NO: 2878 - DNA, 20 bp, Artificial Sequence
  Synthetic: rene_2876_SFMBT2
gtatgaatggagcagttctc

SEQ ID NO: 2879 - DNA, 20 bp, Artificial Sequence
  Synthetic: rene_2877_SFMBT2
agatatcagcacaggactaa

SEQ ID NO: 2880 - DNA, 20 bp, Artificial Sequence
  Synthetic: rene_2878_SFMBT2
ccagtacagtggtgccttaa

SEQ ID NO: 2881 - DNA, 20 bp, Artificial Sequence
  Synthetic: rene_2879_SFMBT2
gtcctgtgctgatatctgaa

SEQ ID NO: 2882 - DNA, 20 bp, Artificial Sequence
  Synthetic: rene_2880_SFMBT2
aatcacactaactatccagt

SEQ ID NO: 2883 - DNA, 20 bp, Artificial Sequence
  Synthetic: rene_2881_SFMBT2
tgtggtgcagtcaaaggata

SEQ ID NO: 2884 - DNA, 20 bp, Artificial Sequence
  Synthetic: rene_2882_SFMBT2
gtgcagaagaaacggaggtc

SEQ ID NO: 2885 - DNA, 20 bp, Artificial Sequence
  Synthetic: rene_2883_SFMBT2
tcaggcccttacctgaacaa

SEQ ID NO: 2886 - DNA, 20 bp, Artificial Sequence
  Synthetic: rene_2884_SGF29
aagacacctcctatgcagat

SEQ ID NO: 2887 - DNA, 20 bp, Artificial Sequence
  Synthetic: rene_2885_SGF29
tccctattaccggacaaagc

SEQ ID NO: 2888 - DNA, 20 bp, Artificial Sequence
  Synthetic: rene_2886_SGF29
ttgggttccttacaagccac

SEQ ID NO: 2889 - DNA, 20 bp, Artificial Sequence
  Synthetic: rene_2887_SGF29
ccttcttcatcgatgtcatc

SEQ ID NO: 2890 - DNA, 20 bp, Artificial Sequence
  Synthetic: rene_2888_SGF29
cgcgatcttgtccagagctt

SEQ ID NO: 2891 - DNA, 20 bp, Artificial Sequence
  Synthetic: rene_2889_SGF29
atcagctgatggagctctgt

SEQ ID NO: 2892 - DNA, 20 bp, Artificial Sequence
  Synthetic: rene_2890_SGF29
tttgatcagctgatggagct

SEQ ID NO: 2893 - DNA, 20 bp, Artificial Sequence
  Synthetic: rene_2891_SH2D2A
cctgaggaccgaagaatcaa

SEQ ID NO: 2894 - DNA, 20 bp, Artificial Sequence
  Synthetic: rene_2892_SH2D2A
gaagcaaaagccaggaccca

SEQ ID NO: 2895 - DNA, 20 bp, Artificial Sequence
  Synthetic: rene_2893_SH2D2A
ggtcctggcttttgcttcca

SEQ ID NO: 2896 - DNA, 20 bp, Artificial Sequence
  Synthetic: rene_2894_SH2D2A
tagacaggtgcttcaggaca

SEQ ID NO: 2897 - DNA, 20 bp, Artificial Sequence
  Synthetic: rene_2895_SH2D2A
gcggggatgggaggcttggg

SEQ ID NO: 2898 - DNA, 20 bp, Artificial Sequence
  Synthetic: rene_2896_SH2D2A
cttccaaagtttgattcttc

SEQ ID NO: 2899 - DNA, 20 bp, Artificial Sequence
  Synthetic: rene_2897_SH2D2A
attcttcggtcctcagggaa

SEQ ID NO: 2900 - DNA, 20 bp, Artificial Sequence
  Synthetic: rene_2898_SH2D2A
atgattgggctgtactgggg

SEQ ID NO: 2901 - DNA, 20 bp, Artificial Sequence
  Synthetic: rene_2899_SHPRH
ctgtgggacactcaaccatc

SEQ ID NO: 2902 - DNA, 20 bp, Artificial Sequence
  Synthetic: rene_2900_SHPRH
gcagaacaggatatagttat

SEQ ID NO: 2903 - DNA, 20 bp, Artificial Sequence
  Synthetic: rene_2901_SHPRH
ccaccacatcctggcagcac

SEQ ID NO: 2904 - DNA, 20 bp, Artificial Sequence
  Synthetic: rene_2902_SHPRH
gacatagcaacatcagttat

SEQ ID NO: 2905 - DNA, 20 bp, Artificial Sequence
  Synthetic: rene_2903_SHPRH
gagtggcaagaactctccac

SEQ ID NO: 2906 - DNA, 20 bp, Artificial Sequence
  Synthetic: rene_2904_SHPRH
agaccctcagatgtaacaat

SEQ ID NO: 2907 - DNA, 20 bp, Artificial Sequence
  Synthetic: rene_2905_SHPRH
acgagaccttcaaaaattaa

SEQ ID NO: 2908 - DNA, 20 bp, Artificial Sequence
  Synthetic: rene_2906_SHPRH
ctaggccagcttccaaaaga

SEQ ID NO: 2909 - DNA, 20 bp, Artificial Sequence
  Synthetic: rene_2907_SIRT1
tccccagtactagaaccaac

SEQ ID NO: 2910 - DNA, 20 bp, Artificial Sequence
  Synthetic: rene_2908_SIRT1
atagagccatgaagtatgac

SEQ ID NO: 2911 - DNA, 20 bp, Artificial Sequence
  Synthetic: rene_2909_SIRT1
gaagaacccatggaggatga

SEQ ID NO: 2912 - DNA, 20 bp, Artificial Sequence
  Synthetic: rene_2910_SIRT1
gtggcaaaaacagatactga

SEQ ID NO: 2913 - DNA, 20 bp, Artificial Sequence
  Synthetic: rene_2911_SIRT1
atgatagcaagcggttcatc

SEQ ID NO: 2914 - DNA, 20 bp, Artificial Sequence
  Synthetic: rene_2912_SIRT1
gaccaagcagctaagagtaa

SEQ ID NO: 2915 - DNA, 20 bp, Artificial Sequence
  Synthetic: rene_2913_SIRT1
gcatattcaccacctaacct

SEQ ID NO: 2916 - DNA, 20 bp, Artificial Sequence
  Synthetic: rene_2914_SIRT1
acagatatagcttcattaat

SEQ ID NO: 2917 - DNA, 20 bp, Artificial Sequence
  Synthetic: rene_2915_SIRT2
gtgagagcctcccagcgcgt

SEQ ID NO: 2918 - DNA, 20 bp, Artificial Sequence
  Synthetic: rene_2916_SIRT2
gctctccatccaccggcctc

SEQ ID NO: 2919 - DNA, 20 bp, Artificial Sequence
  Synthetic: rene_2917_SIRT2
tccctctctgttgtcctggc

SEQ ID NO: 2920 - DNA, 20 bp, Artificial Sequence
  Synthetic: rene_2918_SIRT2
ctggggatgattatgggcct

SEQ ID NO: 2921 - DNA, 20 bp, Artificial Sequence
  Synthetic: rene_2919_SIRT2
atccagcttagcgggtattc

SEQ ID NO: 2922 - DNA, 20 bp, Artificial Sequence
  Synthetic: rene_2920_SIRT2
tccttgttgatgagcaggcg

SEQ ID NO: 2923 - DNA, 20 bp, Artificial Sequence
  Synthetic: rene_2921_SIRT3
cccatggcagatctgctgct

SEQ ID NO: 2924 - DNA, 20 bp, Artificial Sequence
  Synthetic: rene_2922_SIRT3
cagggtacagctccttggcc

SEQ ID NO: 2925 - DNA, 20 bp, Artificial Sequence
  Synthetic: rene_2923_SIRT3
cctgcaggatgtagctgagc

SEQ ID NO: 2926 - DNA, 20 bp, Artificial Sequence
  Synthetic: rene_2924_SIRT3
cctctgccacctgcacagtc

SEQ ID NO: 2927 - DNA, 20 bp, Artificial Sequence
  Synthetic: rene_2925_SIRT3
gccaaggagctgtaccctgg

SEQ ID NO: 2928 - DNA, 20 bp, Artificial Sequence
  Synthetic: rene_2926_SIRT3
tgtgggtgcttcaagtgttg

SEQ ID NO: 2929 - DNA, 20 bp, Artificial Sequence
  Synthetic: rene_2927_SIRT3
actttggccaaggagctgta

SEQ ID NO: 2930 - DNA, 20 bp, Artificial Sequence
  Synthetic: rene_2928_SIRT3
ccgctgcacaaggtcccgca

SEQ ID NO: 2931 - DNA, 20 bp, Artificial Sequence
  Synthetic: rene_2929_SIRT4
ggtcaccaaccagtacagct

SEQ ID NO: 2932 - DNA, 20 bp, Artificial Sequence
  Synthetic: rene_2930_SIRT4
agatggcctccacattgaac

SEQ ID NO: 2933 - DNA, 20 bp, Artificial Sequence
  Synthetic: rene_2931_SIRT4
tgacctgtagtctggtatcc

SEQ ID NO: 2934 - DNA, 20 bp, Artificial Sequence
  Synthetic: rene_2932_SIRT4
agacacgccaagtcatccga

SEQ ID NO: 2935 - DNA, 20 bp, Artificial Sequence
  Synthetic: rene_2933_SIRT4
tcctcactgcctgggagaag

SEQ ID NO: 2936 - DNA, 20 bp, Artificial Sequence
  Synthetic: rene_2934_SIRT4
aggtcccaacctgcgttcaa

SEQ ID NO: 2937 - DNA, 20 bp, Artificial Sequence
  Synthetic: rene_2935_SIRT4
tccggagtgccccaatccgc

SEQ ID NO: 2938 - DNA, 20 bp, Artificial Sequence
  Synthetic: rene_2936_SIRT4
ttcggggacacagtgaaccc

SEQ ID NO: 2939 - DNA, 20 bp, Artificial Sequence
  Synthetic: rene_2937_SIRT5
acacggagaccaccccagct

SEQ ID NO: 2940 - DNA, 20 bp, Artificial Sequence
  Synthetic: rene_2938_SIRT5
gagaaaacctggatcctgcc

SEQ ID NO: 2941 - DNA, 20 bp, Artificial Sequence
  Synthetic: rene_2939_SIRT5
ctgataaagctggacaaatt

SEQ ID NO: 2942 - DNA, 20 bp, Artificial Sequence
  Synthetic: rene_2940_SIRT5
gtgtggacgctggaggcttc

SEQ ID NO: 2943 - DNA, 20 bp, Artificial Sequence
  Synthetic: rene_2941_SIRT5
cagggaccctgtggaacgac

SEQ ID NO: 2944 - DNA, 20 bp, Artificial Sequence
  Synthetic: rene_2942_SIRT5
atgacaggcaagggcttcag

SEQ ID NO: 2945 - DNA, 20 bp, Artificial Sequence
  Synthetic: rene_2943_SIRT5
tccaataacctccagctcct

SEQ ID NO: 2946 - DNA, 20 bp, Artificial Sequence
  Synthetic: rene_2944_SIRT5
tccaaaccacacgacgtgag

SEQ ID NO: 2947 - DNA, 20 bp, Artificial Sequence
  Synthetic: rene_2945_SIRT6
tggaagaatgtgccaagtgt

SEQ ID NO: 2948 - DNA, 20 bp, Artificial Sequence
  Synthetic: rene_2946_SIRT6
gggctggcgggctctgagcc

SEQ ID NO: 2949 - DNA, 20 bp, Artificial Sequence
  Synthetic: rene_2947_SIRT6
gggggtctgtggggggcagg

SEQ ID NO: 2950 - DNA, 20 bp, Artificial Sequence
  Synthetic: rene_2948_SIRT6
agagcgcgcggcccacgcag

SEQ ID NO: 2951 - DNA, 20 bp, Artificial Sequence
  Synthetic: rene_2949_SIRT7
gcaggggctgcacaaaacgc

SEQ ID NO: 2952 - DNA, 20 bp, Artificial Sequence
  Synthetic: rene_2950_SIRT7
tgaagcagtgtccacactcc

SEQ ID NO: 2953 - DNA, 20 bp, Artificial Sequence
  Synthetic: rene_2951_SIRT7
tcactggcgactcccctgcg

SEQ ID NO: 2954 - DNA, 20 bp, Artificial Sequence
  Synthetic: rene_2952_SIRT7
tgcagcccctgccaaaccag

SEQ ID NO: 2955 - DNA, 20 bp, Artificial Sequence
  Synthetic: rene_2953_SIRT7
gggagagggggacgttgggg

SEQ ID NO: 2956 - DNA, 20 bp, Artificial Sequence
  Synthetic: rene_2954_SIRT7
gcgttccggacggcgctggc

SEQ ID NO: 2957 - DNA, 20 bp, Artificial Sequence
  Synthetic: rene_2955_SIRT7
cgctcggagcggctcagacc

SEQ ID NO: 2958 - DNA, 20 bp, Artificial Sequence
  Synthetic: rene_2956_SIRT7
aactgggaagcggcgaccga

SEQ ID NO: 2959 - DNA, 20 bp, Artificial Sequence
  Synthetic: rene_2957_SLC12A2
ggagcactcactagggatgc

SEQ ID NO: 2960 - DNA, 20 bp, Artificial Sequence
  Synthetic: rene_2958_SLC12A2
tatacatatccacatccctc

SEQ ID NO: 2961 - DNA, 20 bp, Artificial Sequence
  Synthetic: rene_2959_SLC12A2
ccataacctttagcaaacat

SEQ ID NO: 2962 - DNA, 20 bp, Artificial Sequence
  Synthetic: rene_2960_SLC12A2
ggcgaataaccactactcca

SEQ ID NO: 2963 - DNA, 20 bp, Artificial Sequence
  Synthetic: rene_2961_SLC12A2
ctatattccacacttactac

SEQ ID NO: 2964 - DNA, 20 bp, Artificial Sequence
  Synthetic: rene_2962_SLC12A2
ggtatctcagtagctggaat

SEQ ID NO: 2965 - DNA, 20 bp, Artificial Sequence
  Synthetic: rene_2963_SLC12A2
aatgtagctgaccaaaagct

SEQ ID NO: 2966 - DNA, 20 bp, Artificial Sequence
  Synthetic: rene_2964_SLC12A2
gatacttccaaaccactcag

SEQ ID NO: 2967 - DNA, 20 bp, Artificial Sequence
  Synthetic: rene_2965_SLC39A3
agaaggcccatcgctcgaaa

SEQ ID NO: 2968 - DNA, 20 bp, Artificial Sequence
  Synthetic: rene_2966_SLC39A3
gagcgatgggccttctcaaa

SEQ ID NO: 2969 - DNA, 20 bp, Artificial Sequence
  Synthetic: rene_2967_SLC39A3
cctcacagcgggcagcagag

SEQ ID NO: 2970 - DNA, 20 bp, Artificial Sequence
  Synthetic: rene_2968_SLC39A3
aacactgatgccaagttcag

SEQ ID NO: 2971 - DNA, 20 bp, Artificial Sequence
  Synthetic: rene_2969_SLC39A3
tggccacgtgcttcaacgct

SEQ ID NO: 2972 - DNA, 20 bp, Artificial Sequence
  Synthetic: rene_2970_SLC39A3
tccccctcctcctgcaggcc

SEQ ID NO: 2973 - DNA, 20 bp, Artificial Sequence
  Synthetic: rene_2971_SLC39A3
ggccagcgggtagtcggtgc

SEQ ID NO: 2974 - DNA, 20 bp, Artificial Sequence
  Synthetic: rene_2972_SLC39A3
gaggaggggtgtttctggcc

SEQ ID NO: 2975 - DNA, 20 bp, Artificial Sequence
  Synthetic: rene_2973_SMAD1
actgatccttccaacaataa

SEQ ID NO: 2976 - DNA, 20 bp, Artificial Sequence
  Synthetic: rene_2974_SMAD1
agactacacccactagggat

SEQ ID NO: 2977 - DNA, 20 bp, Artificial Sequence
  Synthetic: rene_2975_SMAD1
gtgaaaaaactgaagaaaaa

SEQ ID NO: 2978 - DNA, 20 bp, Artificial Sequence
  Synthetic: rene_2976_SMAD1
cacccaagaagtctcttcac

SEQ ID NO: 2979 - DNA, 20 bp, Artificial Sequence
  Synthetic: rene_2977_SMAD1
gttccaagcagaaggaggtc

SEQ ID NO: 2980 - DNA, 20 bp, Artificial Sequence
  Synthetic: rene_2978_SMAD1
agacagtctatgagcttaca

SEQ ID NO: 2981 - DNA, 20 bp, Artificial Sequence
  Synthetic: rene_2979_SMAD1
accaaagcatcaacagcttt

SEQ ID NO: 2982 - DNA, 20 bp, Artificial Sequence
  Synthetic: rene_2980_SMAD1
ctcactctcccaatagcagt

SEQ ID NO: 2983 - DNA, 20 bp, Artificial Sequence
  Synthetic: rene_2981_SMARCA2
cctgtataataacaacttga

SEQ ID NO: 2984 - DNA, 20 bp, Artificial Sequence
  Synthetic: rene_2982_SMARCA2
ctaaggagactgaagaaaga

SEQ ID NO: 2985 - DNA, 20 bp, Artificial Sequence
  Synthetic: rene_2983_SMARCA2
atggaggaggatgagctgcc

SEQ ID NO: 2986 - DNA, 20 bp, Artificial Sequence
  Synthetic: rene_2984_SMARCA2
gaggaaatggaagaggaagt

SEQ ID NO: 2987 - DNA, 20 bp, Artificial Sequence
  Synthetic: rene_2985_SMARCA2
gcagaatacgatcaagcagc

SEQ ID NO: 2988 - DNA, 20 bp, Artificial Sequence
  Synthetic: rene_2986_SMARCA2
agagctgcagcacatttgaa

SEQ ID NO: 2989 - DNA, 20 bp, Artificial Sequence
  Synthetic: rene_2987_SMARCA2
tgagaaggatgctaagcaga

SEQ ID NO: 2990 - DNA, 20 bp, Artificial Sequence
  Synthetic: rene_2988_SMARCA2
agcccaggccaccagctctt

SEQ ID NO: 2991 - DNA, 20 bp, Artificial Sequence
  Synthetic: rene_2989_SMARCA4
cctgtgacggatctgtgata

SEQ ID NO: 2992 - DNA, 20 bp, Artificial Sequence
  Synthetic: rene_2990_SMARCA4
aaggaatatcacagatccgt

SEQ ID NO: 2993 - DNA, 20 bp, Artificial Sequence
  Synthetic: rene_2991_SMARCA4
accagaaccagctgcaccag

SEQ ID NO: 2994 - DNA, 20 bp, Artificial Sequence
  Synthetic: rene_2992_SMARCA4
cccgaggctcggtacaggtc

SEQ ID NO: 2995 - DNA, 20 bp, Artificial Sequence
  Synthetic: rene_2993_SMARCA4
gagtggctggtgtccctgta

SEQ ID NO: 2996 - DNA, 20 bp, Artificial Sequence
  Synthetic: rene_2994_SMARCA4
acagcgactggaatcctcac

SEQ ID NO: 2997 - DNA, 20 bp, Artificial Sequence
  Synthetic: rene_2995_SMARCA4
gcagaacagcagcactttgt

SEQ ID NO: 2998 - DNA, 20 bp, Artificial Sequence
  Synthetic: rene_2996_SMARCA4
ggaagaattctatcaagaag

SEQ ID NO: 2999 - DNA, 20 bp, Artificial Sequence
  Synthetic: rene_2997_SMARCC1
gtatcctcactcacttcact

SEQ ID NO: 3000 - DNA, 20 bp, Artificial Sequence
  Synthetic: rene_2998_SMARCC1
gacgatacgtgtcaatcata

SEQ ID NO: 3001 - DNA, 20 bp, Artificial Sequence
  Synthetic: rene_2999_SMARCC1
accagacccaacatctacct

SEQ ID NO: 3002 - DNA, 20 bp, Artificial Sequence
  Synthetic: rene_3000_SMARCC1
ctgagaaaaacaaggaaaaa

SEQ ID NO: 3003 - DNA, 20 bp, Artificial Sequence
  Synthetic: rene_3001_SMARCC1
ggaagtactacttcttctat

SEQ ID NO: 3004 - DNA, 20 bp, Artificial Sequence
  Synthetic: rene_3002_SMARCC1
gtgaaggccgggttggtgac

SEQ ID NO: 3005 - DNA, 20 bp, Artificial Sequence
  Synthetic: rene_3003_SMARCC1
ggagagcccggagacggtgt

SEQ ID NO: 3006 - DNA, 20 bp, Artificial Sequence
  Synthetic: rene_3004_SMARCC1
cattgaagaactcaggaaga

SEQ ID NO: 3007 - DNA, 20 bp, Artificial Sequence
  Synthetic: rene_3005_SMARCC2
gtagtctagctgactccatc

SEQ ID NO: 3008 - DNA, 20 bp, Artificial Sequence
  Synthetic: rene_3006_SMARCC2
gtgagcggtgcattgctgac

SEQ ID NO: 3009 - DNA, 20 bp, Artificial Sequence
  Synthetic: rene_3007_SMARCC2
ggaagtgtcacctcttctac

SEQ ID NO: 3010 - DNA, 20 bp, Artificial Sequence
  Synthetic: rene_3008_SMARCC2
tcaggagttggagcatcttc

SEQ ID NO: 3011 - DNA, 20 bp, Artificial Sequence
  Synthetic: rene_3009_SMARCC2
gcatgccgcctcctcctcct

SEQ ID NO: 3012 - DNA, 20 bp, Artificial Sequence
  Synthetic: rene_3010_SMARCC2
actggggccgactctgagtc

SEQ ID NO: 3013 - DNA, 20 bp, Artificial Sequence
  Synthetic: rene_3011_SMARCC2
cctagtagtttgggctcaat

SEQ ID NO: 3014 - DNA, 20 bp, Artificial Sequence
  Synthetic: rene_3012_SMARCC2
cttcatagtcttcctcattc

SEQ ID NO: 3015 - DNA, 20 bp, Artificial Sequence
  Synthetic: rene_3013_SMN1
ggatgatacagcactgataa

SEQ ID NO: 3016 - DNA, 20 bp, Artificial Sequence
  Synthetic: rene_3014_SMN1
cccgaagtttcacaaatgtc

SEQ ID NO: 3017 - DNA, 20 bp, Artificial Sequence
  Synthetic: rene_3015_SMN1
cccagctaccattgcttcaa

SEQ ID NO: 3018 - DNA, 20 bp, Artificial Sequence
  Synthetic: rene_3016_SMN1
agagagaaacctgtgttgtg

SEQ ID NO: 3019 - DNA, 20 bp, Artificial Sequence
  Synthetic: rene_3017_SMN1
catatccagtgtaaaccaca

SEQ ID NO: 3020 - DNA, 20 bp, Artificial Sequence
  Synthetic: rene_3018_SMN1
gtttacccgaagtttcacaa

SEQ ID NO: 3021 - DNA, 20 bp, Artificial Sequence
  Synthetic: rene_3019_SMN1
cactggatatggaaatagag

SEQ ID NO: 3022 - DNA, 20 bp, Artificial Sequence
  Synthetic: rene_3020_SMN1
gtcagaagacggttgcattt

SEQ ID NO: 3023 - DNA, 20 bp, Artificial Sequence
  Synthetic: rene_3021_SMNDC1
gaataggctctgttgttgaa

SEQ ID NO: 3024 - DNA, 20 bp, Artificial Sequence
  Synthetic: rene_3022_SMNDC1
gaggtatcttgatattgtgt

SEQ ID NO: 3025 - DNA, 20 bp, Artificial Sequence
  Synthetic: rene_3023_SMNDC1
gcaaagcagctggcaagcta

SEQ ID NO: 3026 - DNA, 20 bp, Artificial Sequence
  Synthetic: rene_3024_SMNDC1
ccagtcacactctcaggtga

SEQ ID NO: 3027 - DNA, 20 bp, Artificial Sequence
  Synthetic: rene_3025_SMNDC1
tcagcaattccacaggttcc

SEQ ID NO: 3028 - DNA, 20 bp, Artificial Sequence
  Synthetic: rene_3026_SMNDC1
cttctactcaacctactcat

SEQ ID NO: 3029 - DNA, 20 bp, Artificial Sequence
  Synthetic: rene_3027_SMNDC1
cagataatgcagcttcaact

SEQ ID NO: 3030 - DNA, 20 bp, Artificial Sequence
  Synthetic: rene_3028_SMNDC1
catgaatgagtaggttgagt

SEQ ID NO: 3031 - DNA, 20 bp, Artificial Sequence
  Synthetic: rene_3029_SMO
tgtcacccctgtggcaactc

SEQ ID NO: 3032 - DNA, 20 bp, Artificial Sequence
  Synthetic: rene_3030_SMO
gtttgtggtcctcacctatg

SEQ ID NO: 3033 - DNA, 20 bp, Artificial Sequence
  Synthetic: rene_3031_SMO
tgggctacaagaactaccga

SEQ ID NO: 3034 - DNA, 20 bp, Artificial Sequence
  Synthetic: rene_3032_SMO
gctcatcgtcactctgccca

SEQ ID NO: 3035 - DNA, 20 bp, Artificial Sequence
  Synthetic: rene_3033_SMO
gaactggcatcgccatgagc

SEQ ID NO: 3036 - DNA, 20 bp, Artificial Sequence
  Synthetic: rene_3034_SMO
gcttcctggcctttggcttt

SEQ ID NO: 3037 - DNA, 20 bp, Artificial Sequence
  Synthetic: rene_3035_SMO
aaggaagtgtgccaggcata

SEQ ID NO: 3038 - DNA, 20 bp, Artificial Sequence
  Synthetic: rene_3036_SMO
tggtcctcacctatgcctgg

SEQ ID NO: 3039 - DNA, 20 bp, Artificial Sequence
  Synthetic: rene_3037_SMYD1
ggaggtcctttcctacctcc

SEQ ID NO: 3040 - DNA, 20 bp, Artificial Sequence
  Synthetic: rene_3038_SMYD1
tgtgccacacctgcttcaag

SEQ ID NO: 3041 - DNA, 20 bp, Artificial Sequence
  Synthetic: rene_3039_SMYD1
ctgacaccaacatctacatg

SEQ ID NO: 3042 - DNA, 20 bp, Artificial Sequence
  Synthetic: rene_3040_SMYD1
actgcacatgtgaacactgc

SEQ ID NO: 3043 - DNA, 20 bp, Artificial Sequence
  Synthetic: rene_3041_SMYD1
cccattactgcgaccgcacc

SEQ ID NO: 3044 - DNA, 20 bp, Artificial Sequence
  Synthetic: rene_3042_SMYD1
caatgtatccttggagaatt

SEQ ID NO: 3045 - DNA, 20 bp, Artificial Sequence
  Synthetic: rene_3043_SMYD1
ccctcagcggtgaagacctc

SEQ ID NO: 3046 - DNA, 20 bp, Artificial Sequence
  Synthetic: rene_3044_SMYD1
ctctcagtgatcagagaggc

SEQ ID NO: 3047 - DNA, 20 bp, Artificial Sequence
  Synthetic: rene_3045_SMYD2
cccaaaaacaaccatgggag

SEQ ID NO: 3048 - DNA, 20 bp, Artificial Sequence
  Synthetic: rene_3046_SMYD2
cctgtgagtgccaggagtgt

SEQ ID NO: 3049 - DNA, 20 bp, Artificial Sequence
  Synthetic: rene_3047_SMYD2
ctccaagcatctcggattcc

SEQ ID NO: 3050 - DNA, 20 bp, Artificial Sequence
  Synthetic: rene_3048_SMYD2
gccagaatccttgctgttag

SEQ ID NO: 3051 - DNA, 20 bp, Artificial Sequence
  Synthetic: rene_3049_SMYD2
ccgtgagctacttccatgat

SEQ ID NO: 3052 - DNA, 20 bp, Artificial Sequence
  Synthetic: rene_3050_SMYD2
ctgtacagctctgacttctg

SEQ ID NO: 3053 - DNA, 20 bp, Artificial Sequence
  Synthetic: rene_3051_SMYD2
ctgtttgatctcagaaatat

SEQ ID NO: 3054 - DNA, 20 bp, Artificial Sequence
  Synthetic: rene_3052_SMYD2
atctcagaaatatatggatg

SEQ ID NO: 3055 - DNA, 20 bp, Artificial Sequence
  Synthetic: rene_3053_SMYD3
ccaggaagccatcccgtcag

SEQ ID NO: 3056 - DNA, 20 bp, Artificial Sequence
  Synthetic: rene_3054_SMYD3
atgagagaagaaatacagga

SEQ ID NO: 3057 - DNA, 20 bp, Artificial Sequence
  Synthetic: rene_3055_SMYD3
gaagaatgcgacgccaacat

SEQ ID NO: 3058 - DNA, 20 bp, Artificial Sequence
  Synthetic: rene_3056_SMYD3
cccaagcaatgaagaatctg

SEQ ID NO: 3059 - DNA, 20 bp, Artificial Sequence
  Synthetic: rene_3057_SMYD3
aagacaactctgccaagaag

SEQ ID NO: 3060 - DNA, 20 bp, Artificial Sequence
  Synthetic: rene_3058_SMYD3
gcaacggaaacagtcacatt

SEQ ID NO: 3061 - DNA, 20 bp, Artificial Sequence
  Synthetic: rene_3059_SMYD3
ccctcttggcggttgcgaac

SEQ ID NO: 3062 - DNA, 20 bp, Artificial Sequence
  Synthetic: rene_3060_SMYD3
ttctctcatgaaatgttgaa

SEQ ID NO: 3063 - DNA, 20 bp, Artificial Sequence
  Synthetic: rene_3061_SMYD4
cctgaaagcaacaatcaggt

SEQ ID NO: 3064 - DNA, 20 bp, Artificial Sequence
  Synthetic: rene_3062_SMYD4
gccagagctgctgggaagct

SEQ ID NO: 3065 - DNA, 20 bp, Artificial Sequence
  Synthetic: rene_3063_SMYD4
tacagagaagaaggaaacaa

SEQ ID NO: 3066 - DNA, 20 bp, Artificial Sequence
  Synthetic: rene_3064_SMYD4
agtgtggggcaaaaggttga

SEQ ID NO: 3067 - DNA, 20 bp, Artificial Sequence
  Synthetic: rene_3065_SMYD4
aggtaaacagatgtccttgt

SEQ ID NO: 3068 - DNA, 20 bp, Artificial Sequence
  Synthetic: rene_3066_SMYD4
caggccatcccaactgagag

SEQ ID NO: 3069 - DNA, 20 bp, Artificial Sequence
  Synthetic: rene_3067_SMYD4
atacttcccattaatatcgc

SEQ ID NO: 3070 - DNA, 20 bp, Artificial Sequence
  Synthetic: rene_3068_SMYD4
cattcatccacaggcagatc

SEQ ID NO: 3071 - DNA, 20 bp, Artificial Sequence
  Synthetic: rene_3069_SMYD5
ggacaggaacagacaaatag

SEQ ID NO: 3072 - DNA, 20 bp, Artificial Sequence
  Synthetic: rene_3070_SMYD5
ccggtcagcctctgggcatt

SEQ ID NO: 3073 - DNA, 20 bp, Artificial Sequence
  Synthetic: rene_3071_SMYD5
tctggaatgcactttatcgc

SEQ ID NO: 3074 - DNA, 20 bp, Artificial Sequence
  Synthetic: rene_3072_SMYD5
catgtcactgctctggagga

SEQ ID NO: 3075 - DNA, 20 bp, Artificial Sequence
  Synthetic: rene_3073_SMYD5
tggaaaggaggtctctgcat

SEQ ID NO: 3076 - DNA, 20 bp, Artificial Sequence
  Synthetic: rene_3074_SMYD5
tctgttcctgtcccaaatgc

SEQ ID NO: 3077 - DNA, 20 bp, Artificial Sequence
  Synthetic: rene_3075_SMYD5
tatcagctacttggactgct

SEQ ID NO: 3078 - DNA, 20 bp, Artificial Sequence
  Synthetic: rene_3076_SMYD5
taacaaaacagccaatgaag

SEQ ID NO: 3079 - DNA, 20 bp, Artificial Sequence
  Synthetic: rene_3077_SND1
agacgagaaccactgaagac

SEQ ID NO: 3080 - DNA, 20 bp, Artificial Sequence
  Synthetic: rene_3078_SND1
gcaggagactcgactttctc

SEQ ID NO: 3081 - DNA, 20 bp, Artificial Sequence
  Synthetic: rene_3079_SND1
acgatagaaaacaagactcc

SEQ ID NO: 3082 - DNA, 20 bp, Artificial Sequence
  Synthetic: rene_3080_SND1
actgagtcgcgactgcttca

SEQ ID NO: 3083 - DNA, 20 bp, Artificial Sequence
  Synthetic: rene_3081_SND1
aatggtatacttgagatccc

SEQ ID NO: 3084 - DNA, 20 bp, Artificial Sequence
  Synthetic: rene_3082_SND1
gaaggaactctcgagctgga

SEQ ID NO: 3085 - DNA, 20 bp, Artificial Sequence
  Synthetic: rene_3083_SND1
actgccatctgcttcccgtc

SEQ ID NO: 3086 - DNA, 20 bp, Artificial Sequence
  Synthetic: rene_3084_SND1
gacgggaagcagatggcagt

SEQ ID NO: 3087 - DNA, 20 bp, Artificial Sequence
  Synthetic: rene_3085_SP100
gaatcacagtagaccttcaa

SEQ ID NO: 3088 - DNA, 20 bp, Artificial Sequence
  Synthetic: rene_3086_SP100
tatccaccagtcgcacagaa

SEQ ID NO: 3089 - DNA, 20 bp, Artificial Sequence
  Synthetic: rene_3087_SP100
tgccagaaccaccaagcaca

SEQ ID NO: 3090 - DNA, 20 bp, Artificial Sequence
  Synthetic: rene_3088_SP100
acaggggtgctctgagagtc

SEQ ID NO: 3091 - DNA, 20 bp, Artificial Sequence
  Synthetic: rene_3089_SP100
actctgaataacaaagtcca

SEQ ID NO: 3092 - DNA, 20 bp, Artificial Sequence
  Synthetic: rene_3090_SP100
ggcgatactcagagcagaac

SEQ ID NO: 3093 - DNA, 20 bp, Artificial Sequence
  Synthetic: rene_3091_SP100
gctcgatatgcagcaatatc

SEQ ID NO: 3094 - DNA, 20 bp, Artificial Sequence
  Synthetic: rene_3092_SP100
tcctcactctgtatacactt

SEQ ID NO: 3095 - DNA, 20 bp, Artificial Sequence
  Synthetic: rene_3093_SP110
actgaacaatgtcaccagaa

SEQ ID NO: 3096 - DNA, 20 bp, Artificial Sequence
  Synthetic: rene_3094_SP110
gagttgaccagatacatctt

SEQ ID NO: 3097 - DNA, 20 bp, Artificial Sequence
  Synthetic: rene_3095_SP110
gtgttaaccaagttccatcc

SEQ ID NO: 3098 - DNA, 20 bp, Artificial Sequence
  Synthetic: rene_3096_SP110
gttctggagaattatctctt

SEQ ID NO: 3099 - DNA, 20 bp, Artificial Sequence
  Synthetic: rene_3097_SP110
ctctgtcctccaagaataaa

SEQ ID NO: 3100 - DNA, 20 bp, Artificial Sequence
  Synthetic: rene_3098_SP110
atgaagccaatgacggcggt

SEQ ID NO: 3101 - DNA, 20 bp, Artificial Sequence
  Synthetic: rene_3099_SP110
aaggcctcctagacaactcc

SEQ ID NO: 3102 - DNA, 20 bp, Artificial Sequence
  Synthetic: rene_3100_SP110
acctgtctcttctggtgaca

SEQ ID NO: 3103 - DNA, 20 bp, Artificial Sequence
  Synthetic: rene_3101_SP140
gaagatagacccagattact

SEQ ID NO: 3104 - DNA, 20 bp, Artificial Sequence
  Synthetic: rene_3102_SP140
catcctcagtctgtatacac

SEQ ID NO: 3105 - DNA, 20 bp, Artificial Sequence
  Synthetic: rene_3103_SP140
actggagaccacctggccgt

SEQ ID NO: 3106 - DNA, 20 bp, Artificial Sequence
  Synthetic: rene_3104_SP140
gctggtcacatctggaagca

SEQ ID NO: 3107 - DNA, 20 bp, Artificial Sequence
  Synthetic: rene_3105_SP140
ctgaatagcaaacacttcct

SEQ ID NO: 3108 - DNA, 20 bp, Artificial Sequence
  Synthetic: rene_3106_SP140
gagaggtgagtgttcatagc

SEQ ID NO: 3109 - DNA, 20 bp, Artificial Sequence
  Synthetic: rene_3107_SP140
gactggaggctgagtttgag

SEQ ID NO: 3110 - DNA, 20 bp, Artificial Sequence
  Synthetic: rene_3108_SP140
tgtgcagctctgtcactctg

SEQ ID NO: 3111 - DNA, 20 bp, Artificial Sequence
  Synthetic: rene_3109_SP140L
tgtggagctctgtcactctg

SEQ ID NO: 3112 - DNA, 20 bp, Artificial Sequence
  Synthetic: rene_3110_SP140L
ctgaatagcaaacacttcct

SEQ ID NO: 3113 - DNA, 20 bp, Artificial Sequence
  Synthetic: rene_3111_SP140L
actcgagaccagctggccat

SEQ ID NO: 3114 - DNA, 20 bp, Artificial Sequence
  Synthetic: rene_3112_SP140L
atgtcaggcctctcttccct

SEQ ID NO: 3115 - DNA, 20 bp, Artificial Sequence
  Synthetic: rene_3113_SP140L
catcctcagtctgtatacac

SEQ ID NO: 3116 - DNA, 20 bp, Artificial Sequence
  Synthetic: rene_3114_SP140L
ccaagattccatactattat

SEQ ID NO: 3117 - DNA, 20 bp, Artificial Sequence
  Synthetic: rene_3115_SP140L
gctgtgtgcaggaagatggt

SEQ ID NO: 3118 - DNA, 20 bp, Artificial Sequence
  Synthetic: rene_3116_SP140L
atatctccagcttatgtctt

SEQ ID NO: 3119 - DNA, 20 bp, Artificial Sequence
  Synthetic: rene_3117_SPP1
ccacggacctgccagcaacc

SEQ ID NO: 3120 - DNA, 20 bp, Artificial Sequence
  Synthetic: rene_3118_SPP1
actccagttgtccccacagt

SEQ ID NO: 3121 - DNA, 20 bp, Artificial Sequence
  Synthetic: rene_3119_SPP1
gggtctacaaccagcatatc

SEQ ID NO: 3122 - DNA, 20 bp, Artificial Sequence
  Synthetic: rene_3120_SPP1
gccatgtggccacagcatct

SEQ ID NO: 3123 - DNA, 20 bp, Artificial Sequence
  Synthetic: rene_3121_SPP1
acctcagtccataaaccaca

SEQ ID NO: 3124 - DNA, 20 bp, Artificial Sequence
  Synthetic: rene_3122_SPP1
catgtgtgaggtgatgtcct

SEQ ID NO: 3125 - DNA, 20 bp, Artificial Sequence
  Synthetic: rene_3123_SPP1
cctcctaggcatcacctgtg

SEQ ID NO: 3126 - DNA, 20 bp, Artificial Sequence
  Synthetic: rene_3124_SPP1
ataactgtccttcccacggc

SEQ ID NO: 3127 - DNA, 20 bp, Artificial Sequence
  Synthetic: rene_3125_SPRED2
gtgtagaccaagtcctttct

SEQ ID NO: 3128 - DNA, 20 bp, Artificial Sequence
  Synthetic: rene_3126_SPRED2
cctccggtggatggctctta

SEQ ID NO: 3129 - DNA, 20 bp, Artificial Sequence
  Synthetic: rene_3127_SPRED2
atcactggaaggtcgataat

SEQ ID NO: 3130 - DNA, 20 bp, Artificial Sequence
  Synthetic: rene_3128_SPRED2
ctggccccctgtatgtgctg

SEQ ID NO: 3131 - DNA, 20 bp, Artificial Sequence
  Synthetic: rene_3129_SPRED2
cttactcccctgtcaaaggc

SEQ ID NO: 3132 - DNA, 20 bp, Artificial Sequence
  Synthetic: rene_3130_SPRED2
acaggggagtaaggaaagca

SEQ ID NO: 3133 - DNA, 20 bp, Artificial Sequence
  Synthetic: rene_3131_SPRED2
gcctaggcgaggaccccaaa

SEQ ID NO: 3134 - DNA, 20 bp, Artificial Sequence
  Synthetic: rene_3132_SPRED2
gacttactttccaaagccct

SEQ ID NO: 3135 - DNA, 20 bp, Artificial Sequence
  Synthetic: rene_3133_SPRY2
ggatggctctgatctgatcc

SEQ ID NO: 3136 - DNA, 20 bp, Artificial Sequence
  Synthetic: rene_3134_SPRY2
ggttgcacccggattatgcc

SEQ ID NO: 3137 - DNA, 20 bp, Artificial Sequence
  Synthetic: rene_3135_SPRY2
acacagcatacacaagtccc

SEQ ID NO: 3138 - DNA, 20 bp, Artificial Sequence
  Synthetic: rene_3136_SPRY2
cagcggcaaccaggcctgtt

SEQ ID NO: 3139 - DNA, 20 bp, Artificial Sequence
  Synthetic: rene_3137_SPRY2
ctgcaaagttcccactgtcc

SEQ ID NO: 3140 - DNA, 20 bp, Artificial Sequence
  Synthetic: rene_3138_SPRY2
aggcaacccttggctggaag

SEQ ID NO: 3141 - DNA, 20 bp, Artificial Sequence
  Synthetic: rene_3139_SPRY2
tggtgttaccttccagccaa

SEQ ID NO: 3142 - DNA, 20 bp, Artificial Sequence
  Synthetic: rene_3140_SPRY2
cacttgccacagtcctcaca

SEQ ID NO: 3143 - DNA, 20 bp, Artificial Sequence
  Synthetic: rene_3141_SPTB
actgagccaggtctctctca

SEQ ID NO: 3144 - DNA, 20 bp, Artificial Sequence
  Synthetic: rene_3142_SPTB
gggaagaagctgaatctctt

SEQ ID NO: 3145 - DNA, 20 bp, Artificial Sequence
  Synthetic: rene_3143_SPTB
ccactacttctccaagatga

SEQ ID NO: 3146 - DNA, 20 bp, Artificial Sequence
  Synthetic: rene_3144_SPTB
ggtggaggagaggctgcctc

SEQ ID NO: 3147 - DNA, 20 bp, Artificial Sequence
  Synthetic: rene_3145_SPTB
cctccagctggaaggatggc

SEQ ID NO: 3148 - DNA, 20 bp, Artificial Sequence
  Synthetic: rene_3146_SPTB
gggattccccagatgtgacc

SEQ ID NO: 3149 - DNA, 20 bp, Artificial Sequence
  Synthetic: rene_3147_SPTB
ccatccagtcccggatgaga

SEQ ID NO: 3150 - DNA, 20 bp, Artificial Sequence
  Synthetic: rene_3148_SPTB
ccaccatgcggccaccgaga

SEQ ID NO: 3151 - DNA, 20 bp, Artificial Sequence
  Synthetic: rene_3149_SRC
agaggagcccatttacatcg

SEQ ID NO: 3152 - DNA, 20 bp, Artificial Sequence
  Synthetic: rene_3150_SRC
atggccaccctggtggtacc

SEQ ID NO: 3153 - DNA, 20 bp, Artificial Sequence
  Synthetic: rene_3151_SRC
catcgtcacggagtacatga

SEQ ID NO: 3154 - DNA, 20 bp, Artificial Sequence
  Synthetic: rene_3152_SRC
gcaagatcaccagacgggag

SEQ ID NO: 3155 - DNA, 20 bp, Artificial Sequence
  Synthetic: rene_3153_SRC
cccgcctcgcagacccccag

SEQ ID NO: 3156 - DNA, 20 bp, Artificial Sequence
  Synthetic: rene_3154_SRC
ggctggctcggctcattgaa

SEQ ID NO: 3157 - DNA, 20 bp, Artificial Sequence
  Synthetic: rene_3155_SRC
tcaagggggagacaggcaag

SEQ ID NO: 3158 - DNA, 20 bp, Artificial Sequence
  Synthetic: rene_3156_SRC
gtggtctcactttctcgcac

SEQ ID NO: 3159 - DNA, 20 bp, Artificial Sequence
  Synthetic: rene_3157_SRSF7
gccacactcatagcatctat

SEQ ID NO: 3160 - DNA, 20 bp, Artificial Sequence
  Synthetic: rene_3158_SRSF7
atagaccacctgcccgacgt

SEQ ID NO: 3161 - DNA, 20 bp, Artificial Sequence
  Synthetic: rene_3159_SRSF7
tcgcaatccatacagttctt

SEQ ID NO: 3162 - DNA, 20 bp, Artificial Sequence
  Synthetic: rene_3160_SRSF7
gagatggagatctggacttt

SEQ ID NO: 3163 - DNA, 20 bp, Artificial Sequence
  Synthetic: rene_3161_SRSF7
catccagtcctcgtactgca

SEQ ID NO: 3164 - DNA, 20 bp, Artificial Sequence
  Synthetic: rene_3162_SRSF7
tagaaccagacctagatctt

SEQ ID NO: 3165 - DNA, 20 bp, Artificial Sequence
  Synthetic: rene_3163_SRSF7
ccagcgccagttcccaggtt

SEQ ID NO: 3166 - DNA, 20 bp, Artificial Sequence
  Synthetic: rene_3164_SRSF7
cctttgtggaattcgaagat

SEQ ID NO: 3167 - DNA, 20 bp, Artificial Sequence
  Synthetic: rene_3165_STAG3
agagtggctgccagattata

SEQ ID NO: 3168 - DNA, 20 bp, Artificial Sequence
  Synthetic: rene_3166_STAG3
cattctctggacactaaccc

SEQ ID NO: 3169 - DNA, 20 bp, Artificial Sequence
  Synthetic: rene_3167_STAG3
ccagggaggtcatcagtttc

SEQ ID NO: 3170 - DNA, 20 bp, Artificial Sequence
  Synthetic: rene_3168_STAG3
cccccgactcttccatcagg

SEQ ID NO: 3171 - DNA, 20 bp, Artificial Sequence
  Synthetic: rene_3169_STAG3
catggtcatggacagagagt

SEQ ID NO: 3172 - DNA, 20 bp, Artificial Sequence
  Synthetic: rene_3170_STAG3
ctgaagctactctccagtct

SEQ ID NO: 3173 - DNA, 20 bp, Artificial Sequence
  Synthetic: rene_3171_STAG3
cccgcagccagctagtagat

SEQ ID NO: 3174 - DNA, 20 bp, Artificial Sequence
  Synthetic: rene_3172_STAG3
cagactccacacaacccttc

SEQ ID NO: 3175 - DNA, 20 bp, Artificial Sequence
  Synthetic: rene_3173_STK31
agaagacgcaatggataata

SEQ ID NO: 3176 - DNA, 20 bp, Artificial Sequence
  Synthetic: rene_3174_STK31
gtgaagtcaaaatctccaac

SEQ ID NO: 3177 - DNA, 20 bp, Artificial Sequence
  Synthetic: rene_3175_STK31
aactcaggtgacatcaaact

SEQ ID NO: 3178 - DNA, 20 bp, Artificial Sequence
  Synthetic: rene_3176_STK31
ggtcaagattccccaaaact

SEQ ID NO: 3179 - DNA, 20 bp, Artificial Sequence
  Synthetic: rene_3177_STK31
atgtcacctgagttgaaaat

SEQ ID NO: 3180 - DNA, 20 bp, Artificial Sequence
  Synthetic: rene_3178_STK31
ggaaaagacctttcagatgc

SEQ ID NO: 3181 - DNA, 20 bp, Artificial Sequence
  Synthetic: rene_3179_STK31
ccctagggtagtatgggacc

SEQ ID NO: 3182 - DNA, 20 bp, Artificial Sequence
  Synthetic: rene_3180_STK31
tagtgttgccaaaaagtata

SEQ ID NO: 3183 - DNA, 20 bp, Artificial Sequence
  Synthetic: rene_3181_STX1B
acctgctccacatcctccga

SEQ ID NO: 3184 - DNA, 20 bp, Artificial Sequence
  Synthetic: rene_3182_STX1B
tcaatgcagccccggatctc

SEQ ID NO: 3185 - DNA, 20 bp, Artificial Sequence
  Synthetic: rene_3183_STX1B
gaccgaaccttgttggccgt

SEQ ID NO: 3186 - DNA, 20 bp, Artificial Sequence
  Synthetic: rene_3184_STX1B
tggacatggccatgctcgta

SEQ ID NO: 3187 - DNA, 20 bp, Artificial Sequence
  Synthetic: rene_3185_STX1B
actgctttcttggtgtcaga

SEQ ID NO: 3188 - DNA, 20 bp, Artificial Sequence
  Synthetic: rene_3186_STX1B
ttggtgtcagacacagctcg

SEQ ID NO: 3189 - DNA, 20 bp, Artificial Sequence
  Synthetic: rene_3187_STX1B
aatttggaccgaaccttgtt

SEQ ID NO: 3190 - DNA, 20 bp, Artificial Sequence
  Synthetic: rene_3188_STX1B
ctgtgtggtgctgggggtgg

SEQ ID NO: 3191 - DNA, 20 bp, Artificial Sequence
  Synthetic: rene_3189_SUV39H1
cctacaatgaccagggccag

SEQ ID NO: 3192 - DNA, 20 bp, Artificial Sequence
  Synthetic: rene_3190_SUV39H1
aagtcgagtacctgtgcgat

SEQ ID NO: 3193 - DNA, 20 bp, Artificial Sequence
  Synthetic: rene_3191_SUV39H1
taagtccttgtggaactgct

SEQ ID NO: 3194 - DNA, 20 bp, Artificial Sequence
  Synthetic: rene_3192_SUV39H1
ccacaagaaccatccgggca

SEQ ID NO: 3195 - DNA, 20 bp, Artificial Sequence
  Synthetic: rene_3193_SUV39H1
acctggactacgtggaggac

SEQ ID NO: 3196 - DNA, 20 bp, Artificial Sequence
  Synthetic: rene_3194_SUV39H1
gcctggctgggctccctggc

SEQ ID NO: 3197 - DNA, 20 bp, Artificial Sequence
  Synthetic: rene_3195_SUV39H1
cggcaggactcagtcccaca

SEQ ID NO: 3198 - DNA, 20 bp, Artificial Sequence
  Synthetic: rene_3196_SUV39H1
accggtggtgccgccggagc

SEQ ID NO: 3199 - DNA, 20 bp, Artificial Sequence
  Synthetic: rene_3197_SUV39H2
gagggcccaccttcagactt

SEQ ID NO: 3200 - DNA, 20 bp, Artificial Sequence
  Synthetic: rene_3198_SUV39H2
gctgggctgtggtcaataga

SEQ ID NO: 3201 - DNA, 20 bp, Artificial Sequence
  Synthetic: rene_3199_SUV39H2
gcttataataaaaaccaaca

SEQ ID NO: 3202 - DNA, 20 bp, Artificial Sequence
  Synthetic: rene_3200_SUV39H2
acttgatactcttcaggaat

SEQ ID NO: 3203 - DNA, 20 bp, Artificial Sequence
  Synthetic: rene_3201_SUV39H2
aaagaagcaatctgtgcatg

SEQ ID NO: 3204 - DNA, 20 bp, Artificial Sequence
  Synthetic: rene_3202_SUV39H2
cctgagataaataattatgc

SEQ ID NO: 3205 - DNA, 20 bp, Artificial Sequence
  Synthetic: rene_3203_SUV39H2
attgataacctcgatactcg

SEQ ID NO: 3206 - DNA, 20 bp, Artificial Sequence
  Synthetic: rene_3204_SUV39H2
gccttcttcacaatgtactc

SEQ ID NO: 3207 - DNA, 20 bp, Artificial Sequence
  Synthetic: rene_3205_TAF1
ggactgtctcacagcgaaca

SEQ ID NO: 3208 - DNA, 20 bp, Artificial Sequence
  Synthetic: rene_3206_TAF1
gcagtacaaatatccttctc

SEQ ID NO: 3209 - DNA, 20 bp, Artificial Sequence
  Synthetic: rene_3207_TAF1
ggtcaggacgctccttcatt

SEQ ID NO: 3210 - DNA, 20 bp, Artificial Sequence
  Synthetic: rene_3208_TAF1
cctaagagaattcgactctt

SEQ ID NO: 3211 - DNA, 20 bp, Artificial Sequence
  Synthetic: rene_3209_TAF1
gtttaccaacggaagaagag

SEQ ID NO: 3212 - DNA, 20 bp, Artificial Sequence
  Synthetic: rene_3210_TAF1
tatgataccaacacatccct

SEQ ID NO: 3213 - DNA, 20 bp, Artificial Sequence
  Synthetic: rene_3211_TAF1
acatcctccccatcccagat

SEQ ID NO: 3214 - DNA, 20 bp, Artificial Sequence
  Synthetic: rene_3212_TAF1
gagttaggcccaggaacttc

SEQ ID NO: 3215 - DNA, 20 bp, Artificial Sequence
  Synthetic: rene_3213_TAF1L
gctgtacaaatatccttctc

SEQ ID NO: 3216 - DNA, 20 bp, Artificial Sequence
  Synthetic: rene_3214_TAF1L
ccatcctcctcctcatcatc

SEQ ID NO: 3217 - DNA, 20 bp, Artificial Sequence
  Synthetic: rene_3215_TAF1L
ggactgtctcacagcgaaca

SEQ ID NO: 3218 - DNA, 20 bp, Artificial Sequence
  Synthetic: rene_3216_TAF1L
gagaccatacgtaagaacat

SEQ ID NO: 3219 - DNA, 20 bp, Artificial Sequence
  Synthetic: rene_3217_TAF1L
gtgctccagtgtatcttcat

SEQ ID NO: 3220 - DNA, 20 bp, Artificial Sequence
  Synthetic: rene_3218_TAF1L
gtttaccaacggaagaagag

SEQ ID NO: 3221 - DNA, 20 bp, Artificial Sequence
  Synthetic: rene_3219_TAF1L
gtgtgcctgaggaagagatt

SEQ ID NO: 3222 - DNA, 20 bp, Artificial Sequence
  Synthetic: rene_3220_TAF1L
atatcctccccatcccagat

SEQ ID NO: 3223 - DNA, 20 bp, Artificial Sequence
  Synthetic: rene_3221_TAF3
cctctccctatctctctgct

SEQ ID NO: 3224 - DNA, 20 bp, Artificial Sequence
  Synthetic: rene_3222_TAF3
ctgttagcaagaacaatgta

SEQ ID NO: 3225 - DNA, 20 bp, Artificial Sequence
  Synthetic: rene_3223_TAF3
cctggatagtctctttactg

SEQ ID NO: 3226 - DNA, 20 bp, Artificial Sequence
  Synthetic: rene_3224_TAF3
cgtacaacctcatcaatgga

SEQ ID NO: 3227 - DNA, 20 bp, Artificial Sequence
  Synthetic: rene_3225_TAF3
gtcttctgtcctggagagct

SEQ ID NO: 3228 - DNA, 20 bp, Artificial Sequence
  Synthetic: rene_3226_TAF3
actgagtgtagctgaaggag

SEQ ID NO: 3229 - DNA, 20 bp, Artificial Sequence
  Synthetic: rene_3227_TAF3
ctgggcaagagaccactgga

SEQ ID NO: 3230 - DNA, 20 bp, Artificial Sequence
  Synthetic: rene_3228_TAF3
ggtgtaaatgactttgtttc

SEQ ID NO: 3231 - DNA, 20 bp, Artificial Sequence
  Synthetic: rene_3229_TANK
gcttgtcaataatagtctgt

SEQ ID NO: 3232 - DNA, 20 bp, Artificial Sequence
  Synthetic: rene_3230_TANK
ccaccatccattacatccag

SEQ ID NO: 3233 - DNA, 20 bp, Artificial Sequence
  Synthetic: rene_3231_TANK
aggaatagcaagagaaaaac

SEQ ID NO: 3234 - DNA, 20 bp, Artificial Sequence
  Synthetic: rene_3232_TANK
ccacctggagaccataatgc

SEQ ID NO: 3235 - DNA, 20 bp, Artificial Sequence
  Synthetic: rene_3233_TANK
actgtcttcaagcagaggaa

SEQ ID NO: 3236 - DNA, 20 bp, Artificial Sequence
  Synthetic: rene_3234_TANK
tccgtacactgtataggcac

SEQ ID NO: 3237 - DNA, 20 bp, Artificial Sequence
  Synthetic: rene_3235_TANK
agatcccagaaagtcttctc

SEQ ID NO: 3238 - DNA, 20 bp, Artificial Sequence
  Synthetic: rene_3236_TANK
atatggagttcagagacaac

SEQ ID NO: 3239 - DNA, 20 bp, Artificial Sequence
  Synthetic: rene_3237_TCEAL9
gattaaccttccaacgcatc

SEQ ID NO: 3240 - DNA, 20 bp, Artificial Sequence
  Synthetic: rene_3238_TCEAL9
gcctcctcctctagcttctc

SEQ ID NO: 3241 - DNA, 20 bp, Artificial Sequence
  Synthetic: rene_3239_TCEAL9
gagaaaggctgattcaatct

SEQ ID NO: 3242 - DNA, 20 bp, Artificial Sequence
  Synthetic: rene_3240_TCEAL9
gagaagtggatgaaatagat

SEQ ID NO: 3243 - DNA, 20 bp, Artificial Sequence
  Synthetic: rene_3241_TCEAL9
tgactctccttatctcatct

SEQ ID NO: 3244 - DNA, 20 bp, Artificial Sequence
  Synthetic: rene_3242_TCEAL9
aagaagatatacacaacagg

SEQ ID NO: 3245 - DNA, 20 bp, Artificial Sequence
  Synthetic: rene_3243_TCEAL9
ctttggcctcctcctctagc

SEQ ID NO: 3246 - DNA, 20 bp, Artificial Sequence
  Synthetic: rene_3244_TCEAL9
atccacttctctaaacatat

SEQ ID NO: 3247 - DNA, 20 bp, Artificial Sequence
  Synthetic: rene_3245_TCF19
gtccaccccaactaggggag

SEQ ID NO: 3248 - DNA, 20 bp, Artificial Sequence
  Synthetic: rene_3246_TCF19
gtcaataatgtccgactccc

SEQ ID NO: 3249 - DNA, 20 bp, Artificial Sequence
  Synthetic: rene_3247_TCF19
ggatcagtgtggccttgggg

SEQ ID NO: 3250 - DNA, 20 bp, Artificial Sequence
  Synthetic: rene_3248_TCF19
cggcctatgctgccctccca

SEQ ID NO: 3251 - DNA, 20 bp, Artificial Sequence
  Synthetic: rene_3249_TCF19
cccaggtggggcgggaacag

SEQ ID NO: 3252 - DNA, 20 bp, Artificial Sequence
  Synthetic: rene_3250_TCF19
ttcctgggctccataaggac

SEQ ID NO: 3253 - DNA, 20 bp, Artificial Sequence
  Synthetic: rene_3251_TCF19
gccctgaagggcccccagga

SEQ ID NO: 3254 - DNA, 20 bp, Artificial Sequence
  Synthetic: rene_3252_TCF19
ctgccattaccatcccacgg

SEQ ID NO: 3255 - DNA, 20 bp, Artificial Sequence
  Synthetic: rene_3253_TCF20
gcggtcttgttctgcaaggg

SEQ ID NO: 3256 - DNA, 20 bp, Artificial Sequence
  Synthetic: rene_3254_TCF20
cccttacatccatgtagtaa

SEQ ID NO: 3257 - DNA, 20 bp, Artificial Sequence
  Synthetic: rene_3255_TCF20
agagggctccgtactctgtc

SEQ ID NO: 3258 - DNA, 20 bp, Artificial Sequence
  Synthetic: rene_3256_TCF20
gctggagaagtttgccgaga

SEQ ID NO: 3259 - DNA, 20 bp, Artificial Sequence
  Synthetic: rene_3257_TCF20
gaggtacaggtggcagtagt

SEQ ID NO: 3260 - DNA, 20 bp, Artificial Sequence
  Synthetic: rene_3258_TCF20
cgagcagaactgagcctagc

SEQ ID NO: 3261 - DNA, 20 bp, Artificial Sequence
  Synthetic: rene_3259_TCF20
accgaagcaagagggtttcc

SEQ ID NO: 3262 - DNA, 20 bp, Artificial Sequence
  Synthetic: rene_3260_TCF20
gtgtccatggaaaccaagct

SEQ ID NO: 3263 - DNA, 20 bp, Artificial Sequence
  Synthetic: rene_3261_TDRD1
gaatacatgaaccaactctc

SEQ ID NO: 3264 - DNA, 20 bp, Artificial Sequence
  Synthetic: rene_3262_TDRD1
gaagcacctccttgtaagat

SEQ ID NO: 3265 - DNA, 20 bp, Artificial Sequence
  Synthetic: rene_3263_TDRD1
agaggaagagaagaatatgt

SEQ ID NO: 3266 - DNA, 20 bp, Artificial Sequence
  Synthetic: rene_3264_TDRD1
ggagcattgcagtattctaa

SEQ ID NO: 3267 - DNA, 20 bp, Artificial Sequence
  Synthetic: rene_3265_TDRD1
aaaccagatgttcatcaatc

SEQ ID NO: 3268 - DNA, 20 bp, Artificial Sequence
  Synthetic: rene_3266_TDRD1
gcttacgcttctgaagaatc

SEQ ID NO: 3269 - DNA, 20 bp, Artificial Sequence
  Synthetic: rene_3267_TDRD1
aatgtgggcaaccacaccac

SEQ ID NO: 3270 - DNA, 20 bp, Artificial Sequence
  Synthetic: rene_3268_TDRD1
ctgtctcctttggagccaac

SEQ ID NO: 3271 - DNA, 20 bp, Artificial Sequence
  Synthetic: rene_3269_TDRD10
tctgtctcacacaggtcaac

SEQ ID NO: 3272 - DNA, 20 bp, Artificial Sequence
  Synthetic: rene_3270_TDRD10
gcttgtggaagagtttacca

SEQ ID NO: 3273 - DNA, 20 bp, Artificial Sequence
  Synthetic: rene_3271_TDRD10
tgctcctccaacactccatt

SEQ ID NO: 3274 - DNA, 20 bp, Artificial Sequence
  Synthetic: rene_3272_TDRD10
cctttgaggattcgatggac

SEQ ID NO: 3275 - DNA, 20 bp, Artificial Sequence
  Synthetic: rene_3273_TDRD10
ccattcagctcctggattgc

SEQ ID NO: 3276 - DNA, 20 bp, Artificial Sequence
  Synthetic: rene_3274_TDRD10
tgcatggagcccagatctac

SEQ ID NO: 3277 - DNA, 20 bp, Artificial Sequence
  Synthetic: rene_3275_TDRD10
ccaaatccttcaccagaagc

SEQ ID NO: 3278 - DNA, 20 bp, Artificial Sequence
  Synthetic: rene_3276_TDRD10
ggaagaatggagtgttggag

SEQ ID NO: 3279 - DNA, 20 bp, Artificial Sequence
  Synthetic: rene_3277_TDRD12
ggtgaatctctcaatgaatc

SEQ ID NO: 3280 - DNA, 20 bp, Artificial Sequence
  Synthetic: rene_3278_TDRD12
gctcctcacaatagaccaca

SEQ ID NO: 3281 - DNA, 20 bp, Artificial Sequence
  Synthetic: rene_3279_TDRD12
gatcatgatgtcgattatca

SEQ ID NO: 3282 - DNA, 20 bp, Artificial Sequence
  Synthetic: rene_3280_TDRD12
taataacccagaagcaacct

SEQ ID NO: 3283 - DNA, 20 bp, Artificial Sequence
  Synthetic: rene_3281_TDRD12
cctttatgtaactataaaag

SEQ ID NO: 3284 - DNA, 20 bp, Artificial Sequence
  Synthetic: rene_3282_TDRD12
gaaaaaccaagattgaatat

SEQ ID NO: 3285 - DNA, 20 bp, Artificial Sequence
  Synthetic: rene_3283_TDRD12
ctctatagggaagctgcata

SEQ ID NO: 3286 - DNA, 20 bp, Artificial Sequence
  Synthetic: rene_3284_TDRD12
ccaagaacattccagtcaaa

SEQ ID NO: 3287 - DNA, 20 bp, Artificial Sequence
  Synthetic: rene_3285_TDRD15
gatgtggatctgacaatatc

SEQ ID NO: 3288 - DNA, 20 bp, Artificial Sequence
  Synthetic: rene_3286_TDRD15
gcaataccaacagattcatc

SEQ ID NO: 3289 - DNA, 20 bp, Artificial Sequence
  Synthetic: rene_3287_TDRD15
gatgtataataactaaggca

SEQ ID NO: 3290 - DNA, 20 bp, Artificial Sequence
  Synthetic: rene_3288_TDRD15
agtgatgacagctctgtaaa

SEQ ID NO: 3291 - DNA, 20 bp, Artificial Sequence
  Synthetic: rene_3289_TDRD15
ccataaaactctcaactgca

SEQ ID NO: 3292 - DNA, 20 bp, Artificial Sequence
  Synthetic: rene_3290_TDRD15
atagataccacaatctacta

SEQ ID NO: 3293 - DNA, 20 bp, Artificial Sequence
  Synthetic: rene_3291_TDRD15
gtggaagaaagagtatctgg

SEQ ID NO: 3294 - DNA, 20 bp, Artificial Sequence
  Synthetic: rene_3292_TDRD15
gcagattcagtagcagtaat

SEQ ID NO: 3295 - DNA, 20 bp, Artificial Sequence
  Synthetic: rene_3293_TDRD3
ggttaccagcagcattcata

SEQ ID NO: 3296 - DNA, 20 bp, Artificial Sequence
  Synthetic: rene_3294_TDRD3
gattccaagaaatcaaataa

SEQ ID NO: 3297 - DNA, 20 bp, Artificial Sequence
  Synthetic: rene_3295_TDRD3
gaggaggatgtctcagatga

SEQ ID NO: 3298 - DNA, 20 bp, Artificial Sequence
  Synthetic: rene_3296_TDRD3
atgtaaatactgattatcag

SEQ ID NO: 3299 - DNA, 20 bp, Artificial Sequence
  Synthetic: rene_3297_TDRD3
aaagagactcccaaaattca

SEQ ID NO: 3300 - DNA, 20 bp, Artificial Sequence
  Synthetic: rene_3298_TDRD3
ccaggtcctcttcatcttca

SEQ ID NO: 3301 - DNA, 20 bp, Artificial Sequence
  Synthetic: rene_3299_TDRD3
gaaggcagtggattacctag

SEQ ID NO: 3302 - DNA, 20 bp, Artificial Sequence
  Synthetic: rene_3300_TDRD3
aaagcaccatcactatgctg

SEQ ID NO: 3303 - DNA, 20 bp, Artificial Sequence
  Synthetic: rene_3301_TDRD5
ggatgagaactggttacctc

SEQ ID NO: 3304 - DNA, 20 bp, Artificial Sequence
  Synthetic: rene_3302_TDRD5
aagagcaactatcaccaaaa

SEQ ID NO: 3305 - DNA, 20 bp, Artificial Sequence
  Synthetic: rene_3303_TDRD5
tcagaagctctacattcctc

SEQ ID NO: 3306 - DNA, 20 bp, Artificial Sequence
  Synthetic: rene_3304_TDRD5
tgtagagcagaccagagcag

SEQ ID NO: 3307 - DNA, 20 bp, Artificial Sequence
  Synthetic: rene_3305_TDRD5
gaatgaaacaagggtcatac

SEQ ID NO: 3308 - DNA, 20 bp, Artificial Sequence
  Synthetic: rene_3306_TDRD5
agtgagctcaaccctttagc

SEQ ID NO: 3309 - DNA, 20 bp, Artificial Sequence
  Synthetic: rene_3307_TDRD5
ctgagcacccagtacttctg

SEQ ID NO: 3310 - DNA, 20 bp, Artificial Sequence
  Synthetic: rene_3308_TDRD5
gcatcaacaaagaacctgct

SEQ ID NO: 3311 - DNA, 20 bp, Artificial Sequence
  Synthetic: rene_3309_TDRD6
actgagagcatacctgctaa

SEQ ID NO: 3312 - DNA, 20 bp, Artificial Sequence
  Synthetic: rene_3310_TDRD6
gaagtagaagtacagactgc

SEQ ID NO: 3313 - DNA, 20 bp, Artificial Sequence
  Synthetic: rene_3311_TDRD6
ggtatgccattccagacatt

SEQ ID NO: 3314 - DNA, 20 bp, Artificial Sequence
  Synthetic: rene_3312_TDRD6
atatcatgtgtagaatagaa

SEQ ID NO: 3315 - DNA, 20 bp, Artificial Sequence
  Synthetic: rene_3313_TDRD6
gaaacagctgaagaaggaac

SEQ ID NO: 3316 - DNA, 20 bp, Artificial Sequence
  Synthetic: rene_3314_TDRD6
ggatcacaatctgctccatg

SEQ ID NO: 3317 - DNA, 20 bp, Artificial Sequence
  Synthetic: rene_3315_TDRD6
actcccagccttaagatcta

SEQ ID NO: 3318 - DNA, 20 bp, Artificial Sequence
  Synthetic: rene_3316_TDRD6
gatccaacagtaaaggcttt

SEQ ID NO: 3319 - DNA, 20 bp, Artificial Sequence
  Synthetic: rene_3317_TDRD7
cctacactagaagcctatct

SEQ ID NO: 3320 - DNA, 20 bp, Artificial Sequence
  Synthetic: rene_3318_TDRD7
actaaaaccatagtcaacat

SEQ ID NO: 3321 - DNA, 20 bp, Artificial Sequence
  Synthetic: rene_3319_TDRD7
ccacagaagggtaatgaaac

SEQ ID NO: 3322 - DNA, 20 bp, Artificial Sequence
  Synthetic: rene_3320_TDRD7
ccataatccagctcatacac

SEQ ID NO: 3323 - DNA, 20 bp, Artificial Sequence
  Synthetic: rene_3321_TDRD7
gcagatcttccacaatctat

SEQ ID NO: 3324 - DNA, 20 bp, Artificial Sequence
  Synthetic: rene_3322_TDRD7
gaaacaccatagaagcctcc

SEQ ID NO: 3325 - DNA, 20 bp, Artificial Sequence
  Synthetic: rene_3323_TDRD7
tgtgcaggccatggcatagc

SEQ ID NO: 3326 - DNA, 20 bp, Artificial Sequence
  Synthetic: rene_3324_TDRD7
cccctaagaacttccctgac

SEQ ID NO: 3327 - DNA, 20 bp, Artificial Sequence
  Synthetic: rene_3325_TDRD9
acttgaccacactgtctaaa

SEQ ID NO: 3328 - DNA, 20 bp, Artificial Sequence
  Synthetic: rene_3326_TDRD9
cctataagtcgatacaagga

SEQ ID NO: 3329 - DNA, 20 bp, Artificial Sequence
  Synthetic: rene_3327_TDRD9
gatagaaagcacctgccaat

SEQ ID NO: 3330 - DNA, 20 bp, Artificial Sequence
  Synthetic: rene_3328_TDRD9
agtccagtccctgggtacag

SEQ ID NO: 3331 - DNA, 20 bp, Artificial Sequence
  Synthetic: rene_3329_TDRD9
ctataaacaactacagtctc

SEQ ID NO: 3332 - DNA, 20 bp, Artificial Sequence
  Synthetic: rene_3330_TDRD9
gattgagaaggagagcatca

SEQ ID NO: 3333 - DNA, 20 bp, Artificial Sequence
  Synthetic: rene_3331_TDRD9
gttgagacatcttaattgcc

SEQ ID NO: 3334 - DNA, 20 bp, Artificial Sequence
  Synthetic: rene_3332_TDRD9
acttgaactcagcgttcatt

SEQ ID NO: 3335 - DNA, 20 bp, Artificial Sequence
  Synthetic: rene_3333_TDRKH
gctccagatgccttacagat

SEQ ID NO: 3336 - DNA, 20 bp, Artificial Sequence
  Synthetic: rene_3334_TDRKH
cctatacctgcggtatagga

SEQ ID NO: 3337 - DNA, 20 bp, Artificial Sequence
  Synthetic: rene_3335_TDRKH
gtctcagtgagcaacgtgct

SEQ ID NO: 3338 - DNA, 20 bp, Artificial Sequence
  Synthetic: rene_3336_TDRKH
atgctgatgagtacctagaa

SEQ ID NO: 3339 - DNA, 20 bp, Artificial Sequence
  Synthetic: rene_3337_TDRKH
cgtgggaccctggtttctgc

SEQ ID NO: 3340 - DNA, 20 bp, Artificial Sequence
  Synthetic: rene_3338_TDRKH
cctacaaatggttcctggta

SEQ ID NO: 3341 - DNA, 20 bp, Artificial Sequence
  Synthetic: rene_3339_TDRKH
atagactcactcattgtgct

SEQ ID NO: 3342 - DNA, 20 bp, Artificial Sequence
  Synthetic: rene_3340_TDRKH
tgcttctgagcaccctaacc

SEQ ID NO: 3343 - DNA, 20 bp, Artificial Sequence
  Synthetic: rene_3341_TET2
gaagaacaccaccactaccc

SEQ ID NO: 3344 - DNA, 20 bp, Artificial Sequence
  Synthetic: rene_3342_TET2
gcttcccaaagagccaagcc

SEQ ID NO: 3345 - DNA, 20 bp, Artificial Sequence
  Synthetic: rene_3343_TET2
gtagcagtggagagctacag

SEQ ID NO: 3346 - DNA, 20 bp, Artificial Sequence
  Synthetic: rene_3344_TET2
agagaataaagaacagacta

SEQ ID NO: 3347 - DNA, 20 bp, Artificial Sequence
  Synthetic: rene_3345_TET2
actagacaaaccactgctgc

SEQ ID NO: 3348 - DNA, 20 bp, Artificial Sequence
  Synthetic: rene_3346_TET2
ccagaagcaagatcccaagg

SEQ ID NO: 3349 - DNA, 20 bp, Artificial Sequence
  Synthetic: rene_3347_TET2
gccgaaaagaactcagtacc

SEQ ID NO: 3350 - DNA, 20 bp, Artificial Sequence
  Synthetic: rene_3348_TET2
agatatgcccatctcctgca

SEQ ID NO: 3351 - DNA, 20 bp, Artificial Sequence
  Synthetic: rene_3349_TMEM116
ccagacagaatacaggtgtc

SEQ ID NO: 3352 - DNA, 20 bp, Artificial Sequence
  Synthetic: rene_3350_TMEM116
agcccctgctatagaatctc

SEQ ID NO: 3353 - DNA, 20 bp, Artificial Sequence
  Synthetic: rene_3351_TMEM116
ctgccagtacttctaccatt

SEQ ID NO: 3354 - DNA, 20 bp, Artificial Sequence
  Synthetic: rene_3352_TMEM116
atcctcagctctgtgtacaa

SEQ ID NO: 3355 - DNA, 20 bp, Artificial Sequence
  Synthetic: rene_3353_TMEM116
tctacaccgtcaattacatc

SEQ ID NO: 3356 - DNA, 20 bp, Artificial Sequence
  Synthetic: rene_3354_TMEM116
tgtatattatggaatacagc

SEQ ID NO: 3357 - DNA, 20 bp, Artificial Sequence
  Synthetic: rene_3355_TMEM116
ctgggcagctttgtactcag

SEQ ID NO: 3358 - DNA, 20 bp, Artificial Sequence
  Synthetic: rene_3356_TMEM116
tctgagcttctgtgacctgc

SEQ ID NO: 3359 - DNA, 20 bp, Artificial Sequence
  Synthetic: rene_3357_TMEM43
gctgtggtagaaaaagtctc

SEQ ID NO: 3360 - DNA, 20 bp, Artificial Sequence
  Synthetic: rene_3358_TMEM43
gctggcacccgtgtccgagc

SEQ ID NO: 3361 - DNA, 20 bp, Artificial Sequence
  Synthetic: rene_3359_TMEM43
atagagaactaaggagcaac

SEQ ID NO: 3362 - DNA, 20 bp, Artificial Sequence
  Synthetic: rene_3360_TMEM43
acagccggaagatggacccc

SEQ ID NO: 3363 - DNA, 20 bp, Artificial Sequence
  Synthetic: rene_3361_TMEM43
tacccattggtacatctcca

SEQ ID NO: 3364 - DNA, 20 bp, Artificial Sequence
  Synthetic: rene_3362_TMEM43
taccacagcgaaaatcccaa

SEQ ID NO: 3365 - DNA, 20 bp, Artificial Sequence
  Synthetic: rene_3363_TMEM43
ctatgctggactgagcggcg

SEQ ID NO: 3366 - DNA, 20 bp, Artificial Sequence
  Synthetic: rene_3364_TMEM43
cgagacctggtcaacattgg

SEQ ID NO: 3367 - DNA, 20 bp, Artificial Sequence
  Synthetic: rene_3365_TMEM47
tatagacctgttgcggtcat

SEQ ID NO: 3368 - DNA, 20 bp, Artificial Sequence
  Synthetic: rene_3366_TMEM47
ccatgagttcaactggggtt

SEQ ID NO: 3369 - DNA, 20 bp, Artificial Sequence
  Synthetic: rene_3367_TMEM47
aatgaacttgattgggtaaa

SEQ ID NO: 3370 - DNA, 20 bp, Artificial Sequence
  Synthetic: rene_3368_TMEM47
cggcaggactcccacaacga

SEQ ID NO: 3371 - DNA, 20 bp, Artificial Sequence
  Synthetic: rene_3369_TMEM47
gtttgggggtgccatccttt

SEQ ID NO: 3372 - DNA, 20 bp, Artificial Sequence
  Synthetic: rene_3370_TMEM47
aagctcacagtttcaatgaa

SEQ ID NO: 3373 - DNA, 20 bp, Artificial Sequence
  Synthetic: rene_3371_TMEM47
caggtttgcagcctggtcct

SEQ ID NO: 3374 - DNA, 20 bp, Artificial Sequence
  Synthetic: rene_3372_TMEM47
cccaatcaagttcattgaaa

SEQ ID NO: 3375 - DNA, 20 bp, Artificial Sequence
  Synthetic: rene_3373_TMIGD2
ctggcagctgcggcggcccc

SEQ ID NO: 3376 - DNA, 20 bp, Artificial Sequence
  Synthetic: rene_3374_TMIGD2
gggccccccggggccggtat

SEQ ID NO: 3377 - DNA, 20 bp, Artificial Sequence
  Synthetic: rene_3375_TMIGD2
gcctcggctgctgggtgggg

SEQ ID NO: 3378 - DNA, 20 bp, Artificial Sequence
  Synthetic: rene_3376_TMIGD2
ttcaacctccttcccgcaac

SEQ ID NO: 3379 - DNA, 20 bp, Artificial Sequence
  Synthetic: rene_3377_TMIGD2
tccacttaacacggagccgt

SEQ ID NO: 3380 - DNA, 20 bp, Artificial Sequence
  Synthetic: rene_3378_TMIGD2
gggaacccttttggcctcgg

SEQ ID NO: 3381 - DNA, 20 bp, Artificial Sequence
  Synthetic: rene_3379_TNFRSF14
tctcagggagcctcgtcatc

SEQ ID NO: 3382 - DNA, 20 bp, Artificial Sequence
  Synthetic: rene_3380_TNFRSF14
ggctcctccccgtgaatgag

SEQ ID NO: 3383 - DNA, 20 bp, Artificial Sequence
  Synthetic: rene_3381_TNFRSF14
acacatatgattaggccaac

SEQ ID NO: 3384 - DNA, 20 bp, Artificial Sequence
  Synthetic: rene_3382_TNFRSF14
gcactgcagacacttgctta

SEQ ID NO: 3385 - DNA, 20 bp, Artificial Sequence
  Synthetic: rene_3383_TNFRSF14
ggggtggatctccagggagg

SEQ ID NO: 3386 - DNA, 20 bp, Artificial Sequence
  Synthetic: rene_3384_TNFRSF14
ctccacagttggcctaatca

SEQ ID NO: 3387 - DNA, 20 bp, Artificial Sequence
  Synthetic: rene_3385_TNFRSF14
ttcttttcacacatatgatt

SEQ ID NO: 3388 - DNA, 20 bp, Artificial Sequence
  Synthetic: rene_3386_TNFRSF9
gaggacagggactgcaaatc

SEQ ID NO: 3389 - DNA, 20 bp, Artificial Sequence
  Synthetic: rene_3387_TNFRSF9
tgagaccagtacaaactact

SEQ ID NO: 3390 - DNA, 20 bp, Artificial Sequence
  Synthetic: rene_3388_TNFRSF9
aggaccaggaaggagtgttc

SEQ ID NO: 3391 - DNA, 20 bp, Artificial Sequence
  Synthetic: rene_3389_TNFRSF9
agaggacaagatcattgcag

SEQ ID NO: 3392 - DNA, 20 bp, Artificial Sequence
  Synthetic: rene_3390_TNFRSF9
gatggaaagtctgtgcttgt

SEQ ID NO: 3393 - DNA, 20 bp, Artificial Sequence
  Synthetic: rene_3391_TNFRSF9
actgcctgggggcaggatgc

SEQ ID NO: 3394 - DNA, 20 bp, Artificial Sequence
  Synthetic: rene_3392_TNFRSF9
cagaagaagaagaaggagga

SEQ ID NO: 3395 - DNA, 20 bp, Artificial Sequence
  Synthetic: rene_3393_TNFRSF9
cagtccctgtcctccaaata

SEQ ID NO: 3396 - DNA, 20 bp, Artificial Sequence
  Synthetic: rene_3394_TNFSF13B
aatgcaccaaaaaatgtgac

SEQ ID NO: 3397 - DNA, 20 bp, Artificial Sequence
  Synthetic: rene_3395_TNFSF13B
actgtctgcaatcagttgca

SEQ ID NO: 3398 - DNA, 20 bp, Artificial Sequence
  Synthetic: rene_3396_TNFSF13B
aaaggggaagtgccctagaa

SEQ ID NO: 3399 - DNA, 20 bp, Artificial Sequence
  Synthetic: rene_3397_TNFSF13B
gatgtattcaaaatatgcct

SEQ ID NO: 3400 - DNA, 20 bp, Artificial Sequence
  Synthetic: rene_3398_TNFSF13B
aagctgagaagccatggaac

SEQ ID NO: 3401 - DNA, 20 bp, Artificial Sequence
  Synthetic: rene_3399_TNFSF13B
aatacatcgaaacaaagtca

SEQ ID NO: 3402 - DNA, 20 bp, Artificial Sequence
  Synthetic: rene_3400_TNFSF13B
tatactgataagacctacgc

SEQ ID NO: 3403 - DNA, 20 bp, Artificial Sequence
  Synthetic: rene_3401_TNFSF13B
catcctcccacggaaggaaa

SEQ ID NO: 3404 - DNA, 20 bp, Artificial Sequence
  Synthetic: rene_3402_TNFSF4
atggataagaatcagttctc

SEQ ID NO: 3405 - DNA, 20 bp, Artificial Sequence
  Synthetic: rene_3403_TNFSF4
ggaagtgaggatgaaacctt

SEQ ID NO: 3406 - DNA, 20 bp, Artificial Sequence
  Synthetic: rene_3404_TNFSF4
atcctcacttcccaaaagga

SEQ ID NO: 3407 - DNA, 20 bp, Artificial Sequence
  Synthetic: rene_3405_TNFSF4
tctcatctccctgaagggct

SEQ ID NO: 3408 - DNA, 20 bp, Artificial Sequence
  Synthetic: rene_3406_TNFSF4
ccacattctcttccaggggt

SEQ ID NO: 3409 - DNA, 20 bp, Artificial Sequence
  Synthetic: rene_3407_TNFSF4
aattcgaggataccgatgtg

SEQ ID NO: 3410 - DNA, 20 bp, Artificial Sequence
  Synthetic: rene_3408_TNFSF4
taagtcagagaggccaccat

SEQ ID NO: 3411 - DNA, 20 bp, Artificial Sequence
  Synthetic: rene_3409_TNFSF4
atcctccttttgggaagtga

SEQ ID NO: 3412 - DNA, 20 bp, Artificial Sequence
  Synthetic: rene_3410_TP53BP1
aatgctgtagtacagttccc

SEQ ID NO: 3413 - DNA, 20 bp, Artificial Sequence
  Synthetic: rene_3411_TP53BP1
gtgagagcagatgatccttt

SEQ ID NO: 3414 - DNA, 20 bp, Artificial Sequence
  Synthetic: rene_3412_TP53BP1
gctgaggtaactgctcaatg

SEQ ID NO: 3415 - DNA, 20 bp, Artificial Sequence
  Synthetic: rene_3413_TP53BP1
cctgagagaactcccatgga

SEQ ID NO: 3416 - DNA, 20 bp, Artificial Sequence
  Synthetic: rene_3414_TP53BP1
gccccaaagcatctgttgct

SEQ ID NO: 3417 - DNA, 20 bp, Artificial Sequence
  Synthetic: rene_3415_TP53BP1
aggggaatcaatactaatca

SEQ ID NO: 3418 - DNA, 20 bp, Artificial Sequence
  Synthetic: rene_3416_TP53BP1
agcagcaacccagactataa

SEQ ID NO: 3419 - DNA, 20 bp, Artificial Sequence
  Synthetic: rene_3417_TP53BP1
ccttacccagctcccgagga

SEQ ID NO: 3420 - DNA, 20 bp, Artificial Sequence
  Synthetic: rene_3418_TRIM24
gtgattagtgtatctatgat

SEQ ID NO: 3421 - DNA, 20 bp, Artificial Sequence
  Synthetic: rene_3419_TRIM24
tctataggtgttaacttaac

SEQ ID NO: 3422 - DNA, 20 bp, Artificial Sequence
  Synthetic: rene_3420_TRIM24
gtgatgattcagatgatgac

SEQ ID NO: 3423 - DNA, 20 bp, Artificial Sequence
  Synthetic: rene_3421_TRIM24
cagtggcagcagtacagcat

SEQ ID NO: 3424 - DNA, 20 bp, Artificial Sequence
  Synthetic: rene_3422_TRIM24
cactgatggtagaaataaat

SEQ ID NO: 3425 - DNA, 20 bp, Artificial Sequence
  Synthetic: rene_3423_TRIM24
atggcagtaaagaaataaaa

SEQ ID NO: 3426 - DNA, 20 bp, Artificial Sequence
  Synthetic: rene_3424_TRIM24
cctgttgttatagtgaagca

SEQ ID NO: 3427 - DNA, 20 bp, Artificial Sequence
  Synthetic: rene_3425_TRIM24
agcccagaaactaggatcac

SEQ ID NO: 3428 - DNA, 20 bp, Artificial Sequence
  Synthetic: rene_3426_TRIM28
agtgggacctcaatgcctgg

SEQ ID NO: 3429 - DNA, 20 bp, Artificial Sequence
  Synthetic: rene_3427_TRIM28
gtctcagggccctcagtggc

SEQ ID NO: 3430 - DNA, 20 bp, Artificial Sequence
  Synthetic: rene_3428_TRIM28
acacctgacacatggggctc

SEQ ID NO: 3431 - DNA, 20 bp, Artificial Sequence
  Synthetic: rene_3429_TRIM28
tgagagctgtgatactctca

SEQ ID NO: 3432 - DNA, 20 bp, Artificial Sequence
  Synthetic: rene_3430_TRIM28
cacctggactgtcacctgcc

SEQ ID NO: 3433 - DNA, 20 bp, Artificial Sequence
  Synthetic: rene_3431_TRIM28
gagaagcactgttgcttgca

SEQ ID NO: 3434 - DNA, 20 bp, Artificial Sequence
  Synthetic: rene_3432_TRIM28
tttccacctggactgtcacc

SEQ ID NO: 3435 - DNA, 20 bp, Artificial Sequence
  Synthetic: rene_3433_TRIM28
atgcgtgatagtggcagcaa

SEQ ID NO: 3436 - DNA, 20 bp, Artificial Sequence
  Synthetic: rene_3434_TRIM33
gcagcacaagagatctcctc

SEQ ID NO: 3437 - DNA, 20 bp, Artificial Sequence
  Synthetic: rene_3435_TRIM33
gcagacagcacaccagtctt

SEQ ID NO: 3438 - DNA, 20 bp, Artificial Sequence
  Synthetic: rene_3436_TRIM33
gataatctactaagtagata

SEQ ID NO: 3439 - DNA, 20 bp, Artificial Sequence
  Synthetic: rene_3437_TRIM33
cctgcctgagctacttctga

SEQ ID NO: 3440 - DNA, 20 bp, Artificial Sequence
  Synthetic: rene_3438_TRIM33
tgccctgtacacaaacaaga

SEQ ID NO: 3441 - DNA, 20 bp, Artificial Sequence
  Synthetic: rene_3439_TRIM33
atcagaactgctaggagctt

SEQ ID NO: 3442 - DNA, 20 bp, Artificial Sequence
  Synthetic: rene_3440_TRIM33
acccttatcaatgaaattaa

SEQ ID NO: 3443 - DNA, 20 bp, Artificial Sequence
  Synthetic: rene_3441_TRIM33
tcttcaaagtacaatgcaac

SEQ ID NO: 3444 - DNA, 20 bp, Artificial Sequence
  Synthetic: rene_3442_TRIM47
gacagcgacacagcagacaa

SEQ ID NO: 3445 - DNA, 20 bp, Artificial Sequence
  Synthetic: rene_3443_TRIM47
gttccaaacagctgcaggaa

SEQ ID NO: 3446 - DNA, 20 bp, Artificial Sequence
  Synthetic: rene_3444_TRIM47
gaaccaaaggtgtcaagagg

SEQ ID NO: 3447 - DNA, 20 bp, Artificial Sequence
  Synthetic: rene_3445_TRIM47
gtgaagctgagctccctcgg

SEQ ID NO: 3448 - DNA, 20 bp, Artificial Sequence
  Synthetic: rene_3446_TRIM47
atgggctggaggctcccctg

SEQ ID NO: 3449 - DNA, 20 bp, Artificial Sequence
  Synthetic: rene_3447_TRIM47
ccccgcgcacctgggcccgc

SEQ ID NO: 3450 - DNA, 20 bp, Artificial Sequence
  Synthetic: rene_3448_TRIM47
cggggctcttcacccacaga

SEQ ID NO: 3451 - DNA, 20 bp, Artificial Sequence
  Synthetic: rene_3449_TRIM47
cagatgctgcggccgccctg

SEQ ID NO: 3452 - DNA, 20 bp, Artificial Sequence
  Synthetic: rene_3450_TSC1
gtgagacacagaatagccat

SEQ ID NO: 3453 - DNA, 20 bp, Artificial Sequence
  Synthetic: rene_3451_TSC1
actcccccaggccacagtca

SEQ ID NO: 3454 - DNA, 20 bp, Artificial Sequence
  Synthetic: rene_3452_TSC1
ccgagacagtctcccaggtt

SEQ ID NO: 3455 - DNA, 20 bp, Artificial Sequence
  Synthetic: rene_3453_TSC1
ggtgatctggcctctgaaga

SEQ ID NO: 3456 - DNA, 20 bp, Artificial Sequence
  Synthetic: rene_3454_TSC1
caaggactgggagtgaagat

SEQ ID NO: 3457 - DNA, 20 bp, Artificial Sequence
  Synthetic: rene_3455_TSC1
ggaggtatcaagcctctgag

SEQ ID NO: 3458 - DNA, 20 bp, Artificial Sequence
  Synthetic: rene_3456_TSC1
gcacactcgatcacaacatc

SEQ ID NO: 3459 - DNA, 20 bp, Artificial Sequence
  Synthetic: rene_3457_TSC1
agaggcagcagcatgccctc

SEQ ID NO: 3460 - DNA, 20 bp, Artificial Sequence
  Synthetic: rene_3458_UBR7
actgaaactcttcaaagaac

SEQ ID NO: 3461 - DNA, 20 bp, Artificial Sequence
  Synthetic: rene_3459_UBR7
gttgtgattgtggaaacagc

SEQ ID NO: 3462 - DNA, 20 bp, Artificial Sequence
  Synthetic: rene_3460_UBR7
atgcaggcctggcataccat

SEQ ID NO: 3463 - DNA, 20 bp, Artificial Sequence
  Synthetic: rene_3461_UBR7
gcttgcagttatgaatgtca

SEQ ID NO: 3464 - DNA, 20 bp, Artificial Sequence
  Synthetic: rene_3462_UBR7
ataagccagaactgtgtcgt

SEQ ID NO: 3465 - DNA, 20 bp, Artificial Sequence
  Synthetic: rene_3463_UBR7
tgtatagctcaaatagtttg

SEQ ID NO: 3466 - DNA, 20 bp, Artificial Sequence
  Synthetic: rene_3464_UBR7
agtcaaaaaagagaagaaga

SEQ ID NO: 3467 - DNA, 20 bp, Artificial Sequence
  Synthetic: rene_3465_UBR7
aggagatggtatgccaggcc

SEQ ID NO: 3468 - DNA, 20 bp, Artificial Sequence
  Synthetic: rene_3466_UHRF1
tgatcacaagactgttccgc

SEQ ID NO: 3469 - DNA, 20 bp, Artificial Sequence
  Synthetic: rene_3467_UHRF1
ctgtccctcccctcagcgcc

SEQ ID NO: 3470 - DNA, 20 bp, Artificial Sequence
  Synthetic: rene_3468_UHRF1
cccctgtagaacagcctctg

SEQ ID NO: 3471 - DNA, 20 bp, Artificial Sequence
  Synthetic: rene_3469_UHRF1
acgtggtaaatgacgtcctc

SEQ ID NO: 3472 - DNA, 20 bp, Artificial Sequence
  Synthetic: rene_3470_UHRF1
acatacacgggtagtggtgg

SEQ ID NO: 3473 - DNA, 20 bp, Artificial Sequence
  Synthetic: rene_3471_UHRF1
ctcccatcaatgaccaagaa

SEQ ID NO: 3474 - DNA, 20 bp, Artificial Sequence
  Synthetic: rene_3472_UHRF1
tcgtgtggcgctaccttctg

SEQ ID NO: 3475 - DNA, 20 bp, Artificial Sequence
  Synthetic: rene_3473_UHRF1
cggcaacaagaggaccgcgg

SEQ ID NO: 3476 - DNA, 20 bp, Artificial Sequence
  Synthetic: rene_3474_UHRF2
aagggaggaagatcagcaaa

SEQ ID NO: 3477 - DNA, 20 bp, Artificial Sequence
  Synthetic: rene_3475_UHRF2
ccacgtgactgtccatcaga

SEQ ID NO: 3478 - DNA, 20 bp, Artificial Sequence
  Synthetic: rene_3476_UHRF2
ccaccacatacacgacagga

SEQ ID NO: 3479 - DNA, 20 bp, Artificial Sequence
  Synthetic: rene_3477_UHRF2
agaagagatgatgttgaacc

SEQ ID NO: 3480 - DNA, 20 bp, Artificial Sequence
  Synthetic: rene_3478_UHRF2
gcctcaatctgtgtagatgt

SEQ ID NO: 3481 - DNA, 20 bp, Artificial Sequence
  Synthetic: rene_3479_UHRF2
aactaactcctcaacagcaa

SEQ ID NO: 3482 - DNA, 20 bp, Artificial Sequence
  Synthetic: rene_3480_UHRF2
ctgtcaggagctagtttacc

SEQ ID NO: 3483 - DNA, 20 bp, Artificial Sequence
  Synthetic: rene_3481_UHRF2
ccaccgcttccagtgtatgt

SEQ ID NO: 3484 - DNA, 20 bp, Artificial Sequence
  Synthetic: rene_3482_USB1
agaggtggacagagtcatgg

SEQ ID NO: 3485 - DNA, 20 bp, Artificial Sequence
  Synthetic: rene_3483_USB1
ggagctctgcgtcaggagcc

SEQ ID NO: 3486 - DNA, 20 bp, Artificial Sequence
  Synthetic: rene_3484_USB1
ctgccaaccaggtaaagatt

SEQ ID NO: 3487 - DNA, 20 bp, Artificial Sequence
  Synthetic: rene_3485_USB1
cagtacctgacagtgtgctg

SEQ ID NO: 3488 - DNA, 20 bp, Artificial Sequence
  Synthetic: rene_3486_USB1
ctgggtgacaggggcatctt

SEQ ID NO: 3489 - DNA, 20 bp, Artificial Sequence
  Synthetic: rene_3487_USB1
tcttgattggtgtaaatctt

SEQ ID NO: 3490 - DNA, 20 bp, Artificial Sequence
  Synthetic: rene_3488_USB1
cctggttggcagtaaagaag

SEQ ID NO: 3491 - DNA, 20 bp, Artificial Sequence
  Synthetic: rene_3489_USB1
tgctgtcatcttcaggcccc

SEQ ID NO: 3492 - DNA, 20 bp, Artificial Sequence
  Synthetic: rene_3490_USP49
gctcaggacactacacagcc

SEQ ID NO: 3493 - DNA, 20 bp, Artificial Sequence
  Synthetic: rene_3491_USP49
ggtccactgcaatgactcaa

SEQ ID NO: 3494 - DNA, 20 bp, Artificial Sequence
  Synthetic: rene_3492_USP49
ggacctatccctggaattcc

SEQ ID NO: 3495 - DNA, 20 bp, Artificial Sequence
  Synthetic: rene_3493_USP49
cgtgtcccccaccccacaga

SEQ ID NO: 3496 - DNA, 20 bp, Artificial Sequence
  Synthetic: rene_3494_USP49
cctctgccgtgaactgcaca

SEQ ID NO: 3497 - DNA, 20 bp, Artificial Sequence
  Synthetic: rene_3495_USP49
gaagggtcaaggttgaggaa

SEQ ID NO: 3498 - DNA, 20 bp, Artificial Sequence
  Synthetic: rene_3496_USP49
tatgcagtgatagcgttcag

SEQ ID NO: 3499 - DNA, 20 bp, Artificial Sequence
  Synthetic: rene_3497_USP49
cactcaaagaacagtgcagg

SEQ ID NO: 3500 - DNA, 20 bp, Artificial Sequence
  Synthetic: rene_3498_UTY
ggagaaggtgttgctgtgga

SEQ ID NO: 3501 - DNA, 20 bp, Artificial Sequence
  Synthetic: rene_3499_UTY
gtagaagctaacaatgaaca

SEQ ID NO: 3502 - DNA, 20 bp, Artificial Sequence
  Synthetic: rene_3500_UTY
ggaccaacattgacctctct

SEQ ID NO: 3503 - DNA, 20 bp, Artificial Sequence
  Synthetic: rene_3501_UTY
acagaagtcattcagaacac

SEQ ID NO: 3504 - DNA, 20 bp, Artificial Sequence
  Synthetic: rene_3502_UTY
gagatactgaatagcatagc

SEQ ID NO: 3505 - DNA, 20 bp, Artificial Sequence
  Synthetic: rene_3503_UTY
tgtggtgtcaaacacaacga

SEQ ID NO: 3506 - DNA, 20 bp, Artificial Sequence
  Synthetic: rene_3504_UTY
gctagccacagatctacttc

SEQ ID NO: 3507 - DNA, 20 bp, Artificial Sequence
  Synthetic: rene_3505_UTY
gtgcacaatcatggcaatgt

SEQ ID NO: 3508 - DNA, 20 bp, Artificial Sequence
  Synthetic: rene_3506_VAV1
ccagcagaactctctaaagg

SEQ ID NO: 3509 - DNA, 20 bp, Artificial Sequence
  Synthetic: rene_3507_VAV1
tctgtgatccggtacagtcc

SEQ ID NO: 3510 - DNA, 20 bp, Artificial Sequence
  Synthetic: rene_3508_VAV1
cttgtaacagggtgaagccc

SEQ ID NO: 3511 - DNA, 20 bp, Artificial Sequence
  Synthetic: rene_3509_VAV1
gcacagccaaagcccgctat

SEQ ID NO: 3512 - DNA, 20 bp, Artificial Sequence
  Synthetic: rene_3510_VAV1
tcctgagccctgcgatgtag

SEQ ID NO: 3513 - DNA, 20 bp, Artificial Sequence
  Synthetic: rene_3511_VAV1
gctgtgccaaaatactttgt

SEQ ID NO: 3514 - DNA, 20 bp, Artificial Sequence
  Synthetic: rene_3512_VAV1
ggaagtgagtatgaacacga

SEQ ID NO: 3515 - DNA, 20 bp, Artificial Sequence
  Synthetic: rene_3513_VAV1
atgtgcttgacctcgacgtt

SEQ ID NO: 3516 - DNA, 20 bp, Artificial Sequence
  Synthetic: rene_3514_VCAM1
gaggatacggatatgaaatc

SEQ ID NO: 3517 - DNA, 20 bp, Artificial Sequence
  Synthetic: rene_3515_VCAM1
gattcacattcatatactcc

SEQ ID NO: 3518 - DNA, 20 bp, Artificial Sequence
  Synthetic: rene_3516_VCAM1
tcttggagaacccagataga

SEQ ID NO: 3519 - DNA, 20 bp, Artificial Sequence
  Synthetic: rene_3517_VCAM1
gtactgtgtctcctgtctcc

SEQ ID NO: 3520 - DNA, 20 bp, Artificial Sequence
  Synthetic: rene_3518_VCAM1
ctaaggatccagagattcat

SEQ ID NO: 3521 - DNA, 20 bp, Artificial Sequence
  Synthetic: rene_3519_VCAM1
tcctgagcttctcgtgctct

SEQ ID NO: 3522 - DNA, 20 bp, Artificial Sequence
  Synthetic: rene_3520_VCAM1
tgtgaatccatccacaaagc

SEQ ID NO: 3523 - DNA, 20 bp, Artificial Sequence
  Synthetic: rene_3521_VCAM1
atatccgtatcctccaaaaa

SEQ ID NO: 3524 - DNA, 20 bp, Artificial Sequence
  Synthetic: rene_3522_VIPR1
gagtacactacatcatgttc

SEQ ID NO: 3525 - DNA, 20 bp, Artificial Sequence
  Synthetic: rene_3523_VIPR1
gatgacaaggcagcgagttt

SEQ ID NO: 3526 - DNA, 20 bp, Artificial Sequence
  Synthetic: rene_3524_VIPR1
catgctgacccgcgtcagcc

SEQ ID NO: 3527 - DNA, 20 bp, Artificial Sequence
  Synthetic: rene_3525_VIPR1
agcctgaagtgaagatggtc

SEQ ID NO: 3528 - DNA, 20 bp, Artificial Sequence
  Synthetic: rene_3526_VIPR1
tggtggctatcctctactgc

SEQ ID NO: 3529 - DNA, 20 bp, Artificial Sequence
  Synthetic: rene_3527_VIPR1
catcatccgaatcctgcttc

SEQ ID NO: 3530 - DNA, 20 bp, Artificial Sequence
  Synthetic: rene_3528_VIPR1
tgaagcaggattcggatgat

SEQ ID NO: 3531 - DNA, 20 bp, Artificial Sequence
  Synthetic: rene_3529_VIPR1
gggttccagcccaggacgcc

SEQ ID NO: 3532 - DNA, 20 bp, Artificial Sequence
  Synthetic: rene_3530_YES1
agtggtgccaagttcatatc

SEQ ID NO: 3533 - DNA, 20 bp, Artificial Sequence
  Synthetic: rene_3531_YES1
actctctcttactaagaaaa

SEQ ID NO: 3534 - DNA, 20 bp, Artificial Sequence
  Synthetic: rene_3532_YES1
acattgtcaccccttatctc

SEQ ID NO: 3535 - DNA, 20 bp, Artificial Sequence
  Synthetic: rene_3533_YES1
acagttggacacacagttgt

SEQ ID NO: 3536 - DNA, 20 bp, Artificial Sequence
  Synthetic: rene_3534_YES1
cttaaggaaggagatggaaa

SEQ ID NO: 3537 - DNA, 20 bp, Artificial Sequence
  Synthetic: rene_3535_YES1
ttagtaagagagagtgaaac

SEQ ID NO: 3538 - DNA, 20 bp, Artificial Sequence
  Synthetic: rene_3536_YES1
caatcaaatggacagctcct

SEQ ID NO: 3539 - DNA, 20 bp, Artificial Sequence
  Synthetic: rene_3537_YES1
cttcaagaagctcagataat

SEQ ID NO: 3540 - DNA, 20 bp, Artificial Sequence
  Synthetic: rene_3538_ZCWPW1
agagggaaaagaagttagaa

SEQ ID NO: 3541 - DNA, 20 bp, Artificial Sequence
  Synthetic: rene_3539_ZCWPW1
ctgcctagagatctcttcat

SEQ ID NO: 3542 - DNA, 20 bp, Artificial Sequence
  Synthetic: rene_3540_ZCWPW1
ggaaggaacactggacccag

SEQ ID NO: 3543 - DNA, 20 bp, Artificial Sequence
  Synthetic: rene_3541_ZCWPW1
ctggtccctgatctgagaat

SEQ ID NO: 3544 - DNA, 20 bp, Artificial Sequence
  Synthetic: rene_3542_ZCWPW1
aagaagaaagaggaaaaagc

SEQ ID NO: 3545 - DNA, 20 bp, Artificial Sequence
  Synthetic: rene_3543_ZCWPW1
cctctgaaaagctggctgcc

SEQ ID NO: 3546 - DNA, 20 bp, Artificial Sequence
  Synthetic: rene_3544_ZCWPW1
tcctgttccctgcttggaac

SEQ ID NO: 3547 - DNA, 20 bp, Artificial Sequence
  Synthetic: rene_3545_ZCWPW1
cccattcgtaagcgagtcaa

SEQ ID NO: 3548 - DNA, 20 bp, Artificial Sequence
  Synthetic: rene_3546_ZCWPW2
aagggaaatatgtaacttat

SEQ ID NO: 3549 - DNA, 20 bp, Artificial Sequence
  Synthetic: rene_3547_ZCWPW2
cactgaggaatccattgcat

SEQ ID NO: 3550 - DNA, 20 bp, Artificial Sequence
  Synthetic: rene_3548_ZCWPW2
tgaagaagacttccctgaag

SEQ ID NO: 3551 - DNA, 20 bp, Artificial Sequence
  Synthetic: rene_3549_ZCWPW2
attctcacattgaacccaca

SEQ ID NO: 3552 - DNA, 20 bp, Artificial Sequence
  Synthetic: rene_3550_ZCWPW2
ccaaaaccaggcttccaaga

SEQ ID NO: 3553 - DNA, 20 bp, Artificial Sequence
  Synthetic: rene_3551_ZCWPW2
atgtgatactataatgtcca

SEQ ID NO: 3554 - DNA, 20 bp, Artificial Sequence
  Synthetic: rene_3552_ZCWPW2
ctaaaagagctggagcaaat

SEQ ID NO: 3555 - DNA, 20 bp, Artificial Sequence
  Synthetic: rene_3553_ZCWPW2
catccgggtcataagttaca

SEQ ID NO: 3556 - DNA, 20 bp, Artificial Sequence
  Synthetic: rene_3554_ZFP91
ccaagggctcaggaagaaga

SEQ ID NO: 3557 - DNA, 20 bp, Artificial Sequence
  Synthetic: rene_3555_ZFP91
acctccacctctacttccac

SEQ ID NO: 3558 - DNA, 20 bp, Artificial Sequence
  Synthetic: rene_3556_ZFP91
cttgtcgacaaaaggcatct

SEQ ID NO: 3559 - DNA, 20 bp, Artificial Sequence
  Synthetic: rene_3557_ZFP91
ccttgtgtgccactacgctg

SEQ ID NO: 3560 - DNA, 20 bp, Artificial Sequence
  Synthetic: rene_3558_ZFP91
gcatgtcgcagaagttgctt

SEQ ID NO: 3561 - DNA, 20 bp, Artificial Sequence
  Synthetic: rene_3559_ZFP91
ccacagatattgcaagaaaa

SEQ ID NO: 3562 - DNA, 20 bp, Artificial Sequence
  Synthetic: rene_3560_ZFP91
ttgcaatatctgtggcaaaa

SEQ ID NO: 3563 - DNA, 20 bp, Artificial Sequence
  Synthetic: rene_3561_ZFP91
gttctgacttgcaaatgagc

SEQ ID NO: 3564 - DNA, 20 bp, Artificial Sequence
  Synthetic: rene_3562_ZGPAT
cctgtaccccactcacaagt

SEQ ID NO: 3565 - DNA, 20 bp, Artificial Sequence
  Synthetic: rene_3563_ZGPAT
attgaggaagtcaaacacat

SEQ ID NO: 3566 - DNA, 20 bp, Artificial Sequence
  Synthetic: rene_3564_ZGPAT
cctccaggaagaacgggcac

SEQ ID NO: 3567 - DNA, 20 bp, Artificial Sequence
  Synthetic: rene_3565_ZGPAT
ggaacggtctctgatccgga

SEQ ID NO: 3568 - DNA, 20 bp, Artificial Sequence
  Synthetic: rene_3566_ZGPAT
acttcctcaatgaaaagctg

SEQ ID NO: 3569 - DNA, 20 bp, Artificial Sequence
  Synthetic: rene_3567_ZGPAT
cgggaggccatcactgaggc

SEQ ID NO: 3570 - DNA, 20 bp, Artificial Sequence
  Synthetic: rene_3568_ZGPAT
ggccgacacgcggaaggccg

SEQ ID NO: 3571 - DNA, 20 bp, Artificial Sequence
  Synthetic: rene_3569_ZGPAT
actcgctgctgctgagggag

SEQ ID NO: 3572 - DNA, 20 bp, Artificial Sequence
  Synthetic: rene_3570_ZMYND11
gcccaaaccagctcatgatt

SEQ ID NO: 3573 - DNA, 20 bp, Artificial Sequence
  Synthetic: rene_3571_ZMYND11
gtgtgtatcattccaagtgt

SEQ ID NO: 3574 - DNA, 20 bp, Artificial Sequence
  Synthetic: rene_3572_ZMYND11
gctggccaaaacccaaaacc

SEQ ID NO: 3575 - DNA, 20 bp, Artificial Sequence
  Synthetic: rene_3573_ZMYND11
cctggagaggtgttgatatg

SEQ ID NO: 3576 - DNA, 20 bp, Artificial Sequence
  Synthetic: rene_3574_ZMYND11
gccagccaaagtcatgcaga

SEQ ID NO: 3577 - DNA, 20 bp, Artificial Sequence
  Synthetic: rene_3575_ZMYND11
tgtccatctcaccctgcatg

SEQ ID NO: 3578 - DNA, 20 bp, Artificial Sequence
  Synthetic: rene_3576_ZMYND11
catcattacacagatatgtc

SEQ ID NO: 3579 - DNA, 20 bp, Artificial Sequence
  Synthetic: rene_3577_ZMYND11
attagttgtatcattgttat

SEQ ID NO: 3580 - DNA, 20 bp, Artificial Sequence
  Synthetic: rene_3578_ZMYND8
ggacaccctacacacccaac

SEQ ID NO: 3581 - DNA, 20 bp, Artificial Sequence
  Synthetic: rene_3579_ZMYND8
cgtggagaacatccgcagga

SEQ ID NO: 3582 - DNA, 20 bp, Artificial Sequence
  Synthetic: rene_3580_ZMYND8
ggaggacgtttgaaacttac

SEQ ID NO: 3583 - DNA, 20 bp, Artificial Sequence
  Synthetic: rene_3581_ZMYND8
ctatatgaagcagccactca

SEQ ID NO: 3584 - DNA, 20 bp, Artificial Sequence
  Synthetic: rene_3582_ZMYND8
tgtgaaaaagactaagagca

SEQ ID NO: 3585 - DNA, 20 bp, Artificial Sequence
  Synthetic: rene_3583_ZMYND8
gaccctcccgcccagaatgg

SEQ ID NO: 3586 - DNA, 20 bp, Artificial Sequence
  Synthetic: rene_3584_ZMYND8
gtcgtgataggagctgacag

SEQ ID NO: 3587 - DNA, 20 bp, Artificial Sequence
  Synthetic: rene_3585_ZMYND8
acagcagatggctctttgtc

SEQ ID NO: 3588 - DNA, 20 bp, Artificial Sequence
  Synthetic: rene_3586_NTC
ttgcgattgactaccgcggt

SEQ ID NO: 3589 - DNA, 20 bp, Artificial Sequence
  Synthetic: rene_3587_NTC
ctggatcagctgctttagaa

SEQ ID NO: 3590 - DNA, 20 bp, Artificial Sequence
  Synthetic: rene_3588_NTC
aacatagacccacttgccta

SEQ ID NO: 3591 - DNA, 20 bp, Artificial Sequence
  Synthetic: rene_3589_NTC
ctctctcgatgtagtttatt

SEQ ID NO: 3592 - DNA, 20 bp, Artificial Sequence
  Synthetic: rene_3590_NTC
tccagagccagctatgaaga

SEQ ID NO: 3593 - DNA, 20 bp, Artificial Sequence
  Synthetic: rene_3591_NTC
caagtcaaaacaacggtaat

SEQ ID NO: 3594 - DNA, 20 bp, Artificial Sequence
  Synthetic: rene_3592_NTC
tctaccattggttcgcgggt

SEQ ID NO: 3595 - DNA, 20 bp, Artificial Sequence
  Synthetic: rene_3593_NTC
ggaagtgctttggcgcgtga

SEQ ID NO: 3596 - DNA, 20 bp, Artificial Sequence
  Synthetic: rene_3594_NTC
gactcgacgggttttagtca

SEQ ID NO: 3597 - DNA, 20 bp, Artificial Sequence
  Synthetic: rene_3595_NTC
tgcctatacatttccaaata

SEQ ID NO: 3598 - DNA, 20 bp, Artificial Sequence
  Synthetic: rene_3596_NTC
aacgcatatggaagctggtt

SEQ ID NO: 3599 - DNA, 20 bp, Artificial Sequence
  Synthetic: rene_3597_NTC
gcctttcggattgcttccct

SEQ ID NO: 3600 - DNA, 20 bp, Artificial Sequence
  Synthetic: rene_3598_NTC
agcagagccatgagtaatat

SEQ ID NO: 3601 - DNA, 20 bp, Artificial Sequence
  Synthetic: rene_3599_NTC
actctactggctcgataccc

SEQ ID NO: 3602 - DNA, 20 bp, Artificial Sequence
  Synthetic: rene_3600_NTC
tcaattcgaacaaacccttc

SEQ ID NO: 3603 - DNA, 20 bp, Artificial Sequence
  Synthetic: rene_3601_NTC
tcgctttttcccggttctgt

SEQ ID NO: 3604 - DNA, 20 bp, Artificial Sequence
  Synthetic: rene_3602_NTC
acgggattgaccgtacagta

SEQ ID NO: 3605 - DNA, 20 bp, Artificial Sequence
  Synthetic: rene_3603_NTC
tagcctcaatgtcgctctgg

SEQ ID NO: 3606 - DNA, 20 bp, Artificial Sequence
  Synthetic: rene_3604_NTC
ctcatatccgtctcactcta

SEQ ID NO: 3607 - DNA, 20 bp, Artificial Sequence
  Synthetic: rene_3605_NTC
cacccctaaaatagcatgtc

SEQ ID NO: 3608 - DNA, 20 bp, Artificial Sequence
  Synthetic: rene_3606_NTC
gcgatggcgtaaccaaaaaa

SEQ ID NO: 3609 - DNA, 20 bp, Artificial Sequence
  Synthetic: rene_3607_NTC
agctcgatgctaatgcagat

SEQ ID NO: 3610 - DNA, 20 bp, Artificial Sequence
  Synthetic: rene_3608_NTC
ccaccatcagccttgggagc

SEQ ID NO: 3611 - DNA, 20 bp, Artificial Sequence
  Synthetic: rene_3609_NTC
taacgtcatctacatctatg

SEQ ID NO: 3612 - DNA, 20 bp, Artificial Sequence
  Synthetic: rene_3610_NTC
tggctgtcctgcgagtggat

SEQ ID NO: 3613 - DNA, 20 bp, Artificial Sequence
  Synthetic: rene_3611_NTC
gtagagccattgatctgtac

SEQ ID NO: 3614 - DNA, 20 bp, Artificial Sequence
  Synthetic: rene_3612_NTC
tcgtaaggaagtcagcgggc

SEQ ID NO: 3615 - DNA, 20 bp, Artificial Sequence
  Synthetic: rene_3613_NTC
cgcggtcgagcaaccggttg

SEQ ID NO: 3616 - DNA, 20 bp, Artificial Sequence
  Synthetic: rene_3614_NTC
ccgcttaagacccacaagag

SEQ ID NO: 3617 - DNA, 20 bp, Artificial Sequence
  Synthetic: rene_3615_NTC
gctcggtagaaccttctcac

SEQ ID NO: 3618 - DNA, 20 bp, Artificial Sequence
  Synthetic: rene_3616_NTC
tctaccgagtccaaaggttt

SEQ ID NO: 3619 - DNA, 20 bp, Artificial Sequence
  Synthetic: rene_3617_NTC
ctgagataacttagtccttc

SEQ ID NO: 3620 - DNA, 20 bp, Artificial Sequence
  Synthetic: rene_3618_NTC
agacgctctttagaagcctg

SEQ ID NO: 3621 - DNA, 20 bp, Artificial Sequence
  Synthetic: rene_3619_NTC
cgttaacagcatttgcgaac

SEQ ID NO: 3622 - DNA, 20 bp, Artificial Sequence
  Synthetic: rene_3620_NTC
tcaaccacgctatccaatgg

SEQ ID NO: 3623 - DNA, 20 bp, Artificial Sequence
  Synthetic: rene_3621_NTC
cactgctctgtgtctattta

SEQ ID NO: 3624 - DNA, 20 bp, Artificial Sequence
  Synthetic: rene_3622_NTC
tcgtgtacagtgcggcggga

SEQ ID NO: 3625 - DNA, 20 bp, Artificial Sequence
  Synthetic: rene_3623_NTC
tcgcggaacgaagtaatttg

SEQ ID NO: 3626 - DNA, 20 bp, Artificial Sequence
  Synthetic: rene_3624_NTC
acaacccttacacaacacgt

SEQ ID NO: 3627 - DNA, 20 bp, Artificial Sequence
  Synthetic: rene_3625_NTC
aggggaataattgatattcg

SEQ ID NO: 3628 - DNA, 20 bp, Artificial Sequence
  Synthetic: rene_3626_NTC
aactcgcagactcgtccaat

SEQ ID NO: 3629 - DNA, 20 bp, Artificial Sequence
  Synthetic: rene_3627_NTC
aaaaccataacaggaaggac

SEQ ID NO: 3630 - DNA, 20 bp, Artificial Sequence
  Synthetic: rene_3628_NTC
ttagcgattttgctacacgc

SEQ ID NO: 3631 - DNA, 20 bp, Artificial Sequence
  Synthetic: rene_3629_NTC
cgagattgcagtcattctcg

SEQ ID NO: 3632 - DNA, 20 bp, Artificial Sequence
  Synthetic: rene_3630_NTC
cgaccgttactctgcacgcc

SEQ ID NO: 3633 - DNA, 20 bp, Artificial Sequence
  Synthetic: rene_3631_NTC
ctcccaacttgccgtgttat

SEQ ID NO: 3634 - DNA, 20 bp, Artificial Sequence
  Synthetic: rene_3632_NTC
aattgcaaccgtttaagggt

SEQ ID NO: 3635 - DNA, 20 bp, Artificial Sequence
  Synthetic: rene_3633_NTC
attcatagttgccagaggag

SEQ ID NO: 3636 - DNA, 20 bp, Artificial Sequence
  Synthetic: rene_3634_NTC
tttagtatggagtaaacgca

SEQ ID NO: 3637 - DNA, 20 bp, Artificial Sequence
  Synthetic: rene_3635_NTC
cccggcccaaaagctgcgtc

SEQ ID NO: 3638 - DNA, 20 bp, Artificial Sequence
  Synthetic: rene_3636_NTC
catcattggagcggtacctt

SEQ ID NO: 3639 - DNA, 20 bp, Artificial Sequence
  Synthetic: rene_3637_NTC
cttattatctgccattaaat

SEQ ID NO: 3640 - DNA, 20 bp, Artificial Sequence
  Synthetic: rene_3638_NTC
tcgattagtaccgtgccagg

SEQ ID NO: 3641 - DNA, 20 bp, Artificial Sequence
  Synthetic: rene_3639_NTC
acaccgcgattgccaattac

SEQ ID NO: 3642 - DNA, 20 bp, Artificial Sequence
  Synthetic: rene_3640_NTC
gcacgacttaatgtgttatg

SEQ ID NO: 3643 - DNA, 20 bp, Artificial Sequence
  Synthetic: rene_3641_NTC
tttgttgtactcaaaaaaat

SEQ ID NO: 3644 - DNA, 20 bp, Artificial Sequence
  Synthetic: rene_3642_NTC
aacagttacatatgtgagtc

SEQ ID NO: 3645 - DNA, 20 bp, Artificial Sequence
  Synthetic: rene_3643_NTC
cgaaatgcagtcctttttag

SEQ ID NO: 3646 - DNA, 20 bp, Artificial Sequence
  Synthetic: rene_3644_NTC
gcgcggggtctgtctcaaac

SEQ ID NO: 3647 - DNA, 20 bp, Artificial Sequence
  Synthetic: rene_3645_NTC
tgtggattgtatagtgcctc

SEQ ID NO: 3648 - DNA, 20 bp, Artificial Sequence
  Synthetic: rene_3646_NTC
ttgcgtcccataccatgggc

SEQ ID NO: 3649 - DNA, 20 bp, Artificial Sequence
  Synthetic: rene_3647_NTC
aactcacgcattagcgtatt

SEQ ID NO: 3650 - DNA, 20 bp, Artificial Sequence
  Synthetic: rene_3648_NTC
cgtagcgtttcgaacgaact

SEQ ID NO: 3651 - DNA, 20 bp, Artificial Sequence
  Synthetic: rene_3649_NTC
gccctatctcgttgtcacgc

SEQ ID NO: 3652 - DNA, 20 bp, Artificial Sequence
  Synthetic: rene_3650_NTC
aatcttgtatgccgtaagta

SEQ ID NO: 3653 - DNA, 20 bp, Artificial Sequence
  Synthetic: rene_3651_NTC
gtcaaggattgggagatatc

SEQ ID NO: 3654 - DNA, 20 bp, Artificial Sequence
  Synthetic: rene_3652_NTC
cgagggtttgctaccatgcc

SEQ ID NO: 3655 - DNA, 20 bp, Artificial Sequence
  Synthetic: rene_3653_NTC
gcttggttccttgtactgtt

SEQ ID NO: 3656 - DNA, 20 bp, Artificial Sequence
  Synthetic: rene_3654_NTC
gttattctactcattctgac

SEQ ID NO: 3657 - DNA, 20 bp, Artificial Sequence
  Synthetic: rene_3655_NTC
ggcttagcaaccgataaagt

SEQ ID NO: 3658 - DNA, 20 bp, Artificial Sequence
  Synthetic: rene_3656_NTC
ggtctcaacatctaggtgga

SEQ ID NO: 3659 - DNA, 20 bp, Artificial Sequence
  Synthetic: rene_3657_NTC
tttgttaacactccgaccga

SEQ ID NO: 3660 - DNA, 20 bp, Artificial Sequence
  Synthetic: rene_3658_NTC
catctggtcgacggaccacc

SEQ ID NO: 3661 - DNA, 20 bp, Artificial Sequence
  Synthetic: rene_3659_NTC
ttgcaaacttgttgttgtgg

SEQ ID NO: 3662 - DNA, 20 bp, Artificial Sequence
  Synthetic: rene_3660_NTC
tcgacctagaacagcctatt

SEQ ID NO: 3663 - DNA, 20 bp, Artificial Sequence
  Synthetic: rene_3661_NTC
aatgacaaagtcttgtagtc

SEQ ID NO: 3664 - DNA, 20 bp, Artificial Sequence
  Synthetic: rene_3662_NTC
gccaaacgcgtgagcggcta

SEQ ID NO: 3665 - DNA, 20 bp, Artificial Sequence
  Synthetic: rene_3663_NTC
gccagacgagttatagtcca

SEQ ID NO: 3666 - DNA, 20 bp, Artificial Sequence
  Synthetic: rene_3664_NTC
agaatgaggtgcctatccgc

SEQ ID NO: 3667 - DNA, 20 bp, Artificial Sequence
  Synthetic: rene_3665_NTC
gttgttagtcccgtgaacat

SEQ ID NO: 3668 - DNA, 20 bp, Artificial Sequence
  Synthetic: rene_3666_NTC
tgggccctgtccttggtcca

SEQ ID NO: 3669 - DNA, 20 bp, Artificial Sequence
  Synthetic: rene_3667_NTC
gccactgggccatataggcc

SEQ ID NO: 3670 - DNA, 20 bp, Artificial Sequence
  Synthetic: rene_3668_NTC
actatgacttcatcatgaaa

SEQ ID NO: 3671 - DNA, 20 bp, Artificial Sequence
  Synthetic: rene_3669_NTC
acccagaatcgagtcaggag

SEQ ID NO: 3672 - DNA, 20 bp, Artificial Sequence
  Synthetic: rene_3670_NTC
aaaaagagtgctacagtcct

SEQ ID NO: 3673 - DNA, 20 bp, Artificial Sequence
  Synthetic: rene_3671_NTC
gggccaaattaaaggcggcg

SEQ ID NO: 3674 - DNA, 20 bp, Artificial Sequence
  Synthetic: rene_3672_NTC
gtctattgagcagatgaccc

SEQ ID NO: 3675 - DNA, 20 bp, Artificial Sequence
  Synthetic: rene_3673_NTC
ggtaatcctgaaccccgatt

SEQ ID NO: 3676 - DNA, 20 bp, Artificial Sequence
  Synthetic: rene_3674_NTC
atggtccgtcctcctaccgt

SEQ ID NO: 3677 - DNA, 20 bp, Artificial Sequence
  Synthetic: rene_3675_NTC
atctcgcagctgcttgaaga

SEQ ID NO: 3678 - DNA, 20 bp, Artificial Sequence
  Synthetic: rene_3676_NTC
taagccggcgtctctcacgt

SEQ ID NO: 3679 - DNA, 20 bp, Artificial Sequence
  Synthetic: rene_3677_NTC
ctggacacggtagtctcgag

SEQ ID NO: 3680 - DNA, 20 bp, Artificial Sequence
  Synthetic: rene_3678_NTC
tcaaggaaagtcattacgca

SEQ ID NO: 3681 - DNA, 20 bp, Artificial Sequence
  Synthetic: rene_3679_NTC
atacgctacgggacctcatg

SEQ ID NO: 3682 - DNA, 20 bp, Artificial Sequence
  Synthetic: rene_3680_NTC
cttcacgaggcttctgctcg

SEQ ID NO: 3683 - DNA, 20 bp, Artificial Sequence
  Synthetic: rene_3681_NTC
cgaatagtcctgaagactta

SEQ ID NO: 3684 - DNA, 20 bp, Artificial Sequence
  Synthetic: rene_3682_NTC
tgccctggacccgttgcgta

SEQ ID NO: 3685 - DNA, 20 bp, Artificial Sequence
  Synthetic: rene_3683_NTC
atgtccgtagtactcccccc

SEQ ID NO: 3686 - DNA, 20 bp, Artificial Sequence
  Synthetic: rene_3684_NTC
gacgaaaagttacgcatgct

SEQ ID NO: 3687 - DNA, 20 bp, Artificial Sequence
  Synthetic: rene_3685_NTC
ctggtgctataatgtgaatc

SEQ ID NO: 3688 - DNA, 20 bp, Artificial Sequence
  Synthetic: rene_3686_NTC
agtccatgagagtcgcaatg

SEQ ID NO: 3689 - DNA, 20 bp, Artificial Sequence
  Synthetic: rene_3687_NTC
taacagttaccggttttagt

SEQ ID NO: 3690 - DNA, 20 bp, Artificial Sequence
  Synthetic: rene_3688_NTC
cggcgtgccttccgcactcc

SEQ ID NO: 3691 - DNA, 20 bp, Artificial Sequence
  Synthetic: rene_3689_NTC
taactttcaactacaatgca

SEQ ID NO: 3692 - DNA, 20 bp, Artificial Sequence
  Synthetic: rene_3690_NTC
gcacctagttgcaataattg

SEQ ID NO: 3693 - DNA, 20 bp, Artificial Sequence
  Synthetic: rene_3691_NTC
gagcgcgtccagaggtatcg

SEQ ID NO: 3694 - DNA, 20 bp, Artificial Sequence
  Synthetic: rene_3692_NTC
gcaccgtgctgtgttccaga

SEQ ID NO: 3695 - DNA, 20 bp, Artificial Sequence
  Synthetic: rene_3693_NTC
caccgcaacatttttagccg

SEQ ID NO: 3696 - DNA, 20 bp, Artificial Sequence
  Synthetic: rene_3694_NTC
cttcaagtcataagcttaat

SEQ ID NO: 3697 - DNA, 20 bp, Artificial Sequence
  Synthetic: rene_3695_NTC
taggaacggctcacgtcatt

SEQ ID NO: 3698 - DNA, 20 bp, Artificial Sequence
  Synthetic: rene_3696_NTC
gctgtttcggaccaagccta

SEQ ID NO: 3699 - DNA, 20 bp, Artificial Sequence
  Synthetic: rene_3697_NTC
cggggtcagctaagcacgcc

SEQ ID NO: 3700 - DNA, 20 bp, Artificial Sequence
  Synthetic: rene_3698_NTC
cagacgctgtctttacaatc

SEQ ID NO: 3701 - DNA, 20 bp, Artificial Sequence
  Synthetic: rene_3699_NTC
actttagcgacaccagctca

SEQ ID NO: 3702 - DNA, 20 bp, Artificial Sequence
  Synthetic: rene_3700_NTC
tggttcggttcgctagggac

SEQ ID NO: 3703 - DNA, 20 bp, Artificial Sequence
  Synthetic: rene_3701_NTC
gcatggttgtttcatcgagt

SEQ ID NO: 3704 - DNA, 20 bp, Artificial Sequence
  Synthetic: rene_3702_NTC
gggcgcactgcgtttggcgc

SEQ ID NO: 3705 - DNA, 20 bp, Artificial Sequence
  Synthetic: rene_3703_NTC
tgctatggcgctcctttagg

SEQ ID NO: 3706 - DNA, 20 bp, Artificial Sequence
  Synthetic: rene_3704_NTC
cgactaacataagagccggg

SEQ ID NO: 3707 - DNA, 20 bp, Artificial Sequence
  Synthetic: rene_3705_NTC
cttgaaggagtaaagtcact

SEQ ID NO: 3708 - DNA, 20 bp, Artificial Sequence
  Synthetic: rene_3706_NTC
cgtcatatactcggccttat

SEQ ID NO: 3709 - DNA, 20 bp, Artificial Sequence
  Synthetic: rene_3707_NTC
atgatccagagcaatgacat

SEQ ID NO: 3710 - DNA, 20 bp, Artificial Sequence
  Synthetic: rene_3708_NTC
tgggtgatgacaggagactc

SEQ ID NO: 3711 - DNA, 20 bp, Artificial Sequence
  Synthetic: rene_3709_NTC
catagcaccgatagataaat

SEQ ID NO: 3712 - DNA, 20 bp, Artificial Sequence
  Synthetic: rene_3710_NTC
gggtgtattgattccaatgt

SEQ ID NO: 3713 - DNA, 20 bp, Artificial Sequence
  Synthetic: rene_3711_NTC
gccgtaacaatatgcggact

SEQ ID NO: 3714 - DNA, 20 bp, Artificial Sequence
  Synthetic: rene_3712_NTC
gtttgttgtccaatgtagcg

SEQ ID NO: 3715 - DNA, 20 bp, Artificial Sequence
  Synthetic: rene_3713_NTC
atacgttgacggaagaaaag

SEQ ID NO: 3716 - DNA, 20 bp, Artificial Sequence
  Synthetic: rene_3714_NTC
ccagggtctacctggactgt

SEQ ID NO: 3717 - DNA, 20 bp, Artificial Sequence
  Synthetic: rene_3715_NTC
cactttgacctagtacgcta

SEQ ID NO: 3718 - DNA, 20 bp, Artificial Sequence
  Synthetic: rene_3716_NTC
gggaagagcttaactcctga

SEQ ID NO: 3719 - DNA, 20 bp, Artificial Sequence
  Synthetic: rene_3717_NTC
catagtccggtagccacgca

SEQ ID NO: 3720 - DNA, 20 bp, Artificial Sequence
  Synthetic: rene_3718_NTC
tggatggggacgacccacct

SEQ ID NO: 3721 - DNA, 20 bp, Artificial Sequence
  Synthetic: rene_3719_NTC
ctgcctcaggtagcactacg

SEQ ID NO: 3722 - DNA, 20 bp, Artificial Sequence
  Synthetic: rene_3720_NTC
tagaggatctctagcatatt

SEQ ID NO: 3723 - DNA, 20 bp, Artificial Sequence
  Synthetic: rene_3721_NTC
tgtagtatactcaagacctc

SEQ ID NO: 3724 - DNA, 20 bp, Artificial Sequence
  Synthetic: rene_3722_NTC
gtagtcaaaagtgacgaaag

SEQ ID NO: 3725 - DNA, 20 bp, Artificial Sequence
  Synthetic: rene_3723_NTC
tgcgatctacaccccgctgg

SEQ ID NO: 3726 - DNA, 20 bp, Artificial Sequence
  Synthetic: rene_3724_NTC
tgctggtgtactttggagca

SEQ ID NO: 3727 - DNA, 20 bp, Artificial Sequence
  Synthetic: rene_3725_NTC
ctgttacacctgagaattaa

SEQ ID NO: 3728 - DNA, 20 bp, Artificial Sequence
  Synthetic: rene_3726_NTC
aaggagtctgcgatgcgagc

SEQ ID NO: 3729 - DNA, 20 bp, Artificial Sequence
  Synthetic: rene_3727_NTC
gatacgaagagtgtgaccca

SEQ ID NO: 3730 - DNA, 20 bp, Artificial Sequence
  Synthetic: rene_3728_NTC
cccggcagccggttcgtggc

SEQ ID NO: 3731 - DNA, 20 bp, Artificial Sequence
  Synthetic: rene_3729_NTC
ggttcatttagtttaggagg

SEQ ID NO: 3732 - DNA, 20 bp, Artificial Sequence
  Synthetic: rene_3730_NTC
aaatgtgctctcaaaaggcg

SEQ ID NO: 3733 - DNA, 20 bp, Artificial Sequence
  Synthetic: rene_3731_NTC
ctgcctagggattcctgtga

SEQ ID NO: 3734 - DNA, 20 bp, Artificial Sequence
  Synthetic: rene_3732_NTC
gtatattctgcctatctcgg

SEQ ID NO: 3735 - DNA, 20 bp, Artificial Sequence
  Synthetic: rene_3733_NTC
ctcagcctgacgttcctacc

SEQ ID NO: 3736 - DNA, 20 bp, Artificial Sequence
  Synthetic: rene_3734_NTC
acaccaataataacccttca

SEQ ID NO: 3737 - DNA, 20 bp, Artificial Sequence
  Synthetic: rene_3735_NTC
gcagacaccaaggagctcaa

SEQ ID NO: 3738 - DNA, 20 bp, Artificial Sequence
  Synthetic: rene_3736_NTC
cgcgagccatttacaatcgg

SEQ ID NO: 3739 - DNA, 20 bp, Artificial Sequence
  Synthetic: rene_3737_NTC
gccggctttagcgatgtaga

SEQ ID NO: 3740 - DNA, 20 bp, Artificial Sequence
  Synthetic: rene_3738_NTC
gcaaacgaggccggtcctcg

SEQ ID NO: 3741 - DNA, 20 bp, Artificial Sequence
  Synthetic: rene_3739_NTC
cccccggccattcacgtatc

SEQ ID NO: 3742 - DNA, 20 bp, Artificial Sequence
  Synthetic: rene_3740_NTC
tcaacttgcgattgtatagg

SEQ ID NO: 3743 - DNA, 20 bp, Artificial Sequence
  Synthetic: rene_3741_NTC
gtgcgtgataactgccactt

SEQ ID NO: 3744 - DNA, 20 bp, Artificial Sequence
  Synthetic: rene_3742_NTC
ttagagtttggctacagctt

SEQ ID NO: 3745 - DNA, 20 bp, Artificial Sequence
  Synthetic: rene_3743_NTC
atataagagaccatcgtatc

SEQ ID NO: 3746 - DNA, 20 bp, Artificial Sequence
  Synthetic: rene_3744_NTC
taggtgcggcgacatgggtt

SEQ ID NO: 3747 - DNA, 20 bp, Artificial Sequence
  Synthetic: rene_3745_NTC
taagcagtcacacgggacca

SEQ ID NO: 3748 - DNA, 20 bp, Artificial Sequence
  Synthetic: rene_3746_NTC
ccatcgcggtatctggggcg

SEQ ID NO: 3749 - DNA, 20 bp, Artificial Sequence
  Synthetic: rene_3747_NTC
gactagtacaacactaaaag

SEQ ID NO: 3750 - DNA, 20 bp, Artificial Sequence
  Synthetic: rene_3748_NTC
aagtctgcaatccttactaa

SEQ ID NO: 3751 - DNA, 20 bp, Artificial Sequence
  Synthetic: rene_3749_NTC
tctcacctttactccgccca

SEQ ID NO: 3752 - DNA, 20 bp, Artificial Sequence
  Synthetic: rene_3750_NTC
actgtatctcgagtaggctt

SEQ ID NO: 3753 - DNA, 20 bp, Artificial Sequence
  Synthetic: rene_3751_NTC
gtgtaccgggggtaacgtct

SEQ ID NO: 3754 - DNA, 20 bp, Artificial Sequence
  Synthetic: rene_3752_NTC
cgtgtcttactggcgccctc

SEQ ID NO: 3755 - DNA, 20 bp, Artificial Sequence
  Synthetic: rene_3753_NTC
ctgactggcgctacatctca

SEQ ID NO: 3756 - DNA, 20 bp, Artificial Sequence
  Synthetic: rene_3754_NTC
acggggggtattccacacgt

SEQ ID NO: 3757 - DNA, 20 bp, Artificial Sequence
  Synthetic: rene_3755_NTC
aaaacgcacaggggttaccg

SEQ ID NO: 3758 - DNA, 20 bp, Artificial Sequence
  Synthetic: rene_3756_NTC
tatggataatcctagcccaa

SEQ ID NO: 3759 - DNA, 20 bp, Artificial Sequence
  Synthetic: rene_3757_NTC
gtggcctagtaggtagacga

SEQ ID NO: 3760 - DNA, 20 bp, Artificial Sequence
  Synthetic: rene_3758_NTC
tcccagataaagtcaaattg

SEQ ID NO: 3761 - DNA, 20 bp, Artificial Sequence
  Synthetic: rene_3759_NTC
ttgagaggccagactcaaac

SEQ ID NO: 3762 - DNA, 20 bp, Artificial Sequence
  Synthetic: rene_3760_NTC
agcggtaccctatgcgtggg

SEQ ID NO: 3763 - DNA, 20 bp, Artificial Sequence
  Synthetic: rene_3761_NTC
cgataaaaggctcggatacc

SEQ ID NO: 3764 - DNA, 20 bp, Artificial Sequence
  Synthetic: rene_3762_NTC
cagcggttctttgaatgtgt

SEQ ID NO: 3765 - DNA, 20 bp, Artificial Sequence
  Synthetic: rene_3763_NTC
tttgggcgaagacttgagga

SEQ ID NO: 3766 - DNA, 20 bp, Artificial Sequence
  Synthetic: rene_3764_NTC
tgggaggtacagcagcgagc

SEQ ID NO: 3767 - DNA, 20 bp, Artificial Sequence
  Synthetic: rene_3765_NTC
gccttgtctgcgcgggtact

SEQ ID NO: 3768 - DNA, 20 bp, Artificial Sequence
  Synthetic: rene_3766_NTC
cacctgagccagcctaagcg

SEQ ID NO: 3769 - DNA, 20 bp, Artificial Sequence
  Synthetic: rene_3767_NTC
ataagcagccaaggctctaa

SEQ ID NO: 3770 - DNA, 20 bp, Artificial Sequence
  Synthetic: rene_3768_NTC
gtgatgaggtcctgaaaggt

SEQ ID NO: 3771 - DNA, 20 bp, Artificial Sequence
  Synthetic: rene_3769_NTC
attgacggcccatactgctt

SEQ ID NO: 3772 - DNA, 20 bp, Artificial Sequence
  Synthetic: rene_3770_NTC
cccacactgattttctcagc

SEQ ID NO: 3773 - DNA, 20 bp, Artificial Sequence
  Synthetic: rene_3771_NTC
tgagttcagccggtcatcct

SEQ ID NO: 3774 - DNA, 20 bp, Artificial Sequence
  Synthetic: rene_3772_NTC
cttgatgtctaccgatcggt

SEQ ID NO: 3775 - DNA, 20 bp, Artificial Sequence
  Synthetic: rene_3773_NTC
ttgagcagtccagttggccc

SEQ ID NO: 3776 - DNA, 20 bp, Artificial Sequence
  Synthetic: rene_3774_NTC
gtgataccagaacaaggcct

SEQ ID NO: 3777 - DNA, 20 bp, Artificial Sequence
  Synthetic: rene_3775_NTC
acctcctttatctatccaat

SEQ ID NO: 3778 - DNA, 20 bp, Artificial Sequence
  Synthetic: rene_3776_NTC
ggccaattcacagatgtcgt

SEQ ID NO: 3779 - DNA, 20 bp, Artificial Sequence
  Synthetic: rene_3777_NTC
ggacccgtaccttgcggtag

SEQ ID NO: 3780 - DNA, 20 bp, Artificial Sequence
  Synthetic: rene_3778_NTC
aactattgtgccgcatccta

SEQ ID NO: 3781 - DNA, 20 bp, Artificial Sequence
  Synthetic: rene_3779_NTC
cgtcacgttacataacgccc

SEQ ID NO: 3782 - DNA, 20 bp, Artificial Sequence
  Synthetic: rene_3780_NTC
cagacccatgggtaggctcc

SEQ ID NO: 3783 - DNA, 20 bp, Artificial Sequence
  Synthetic: rene_3781_NTC
ccagctgcttatagctattc

SEQ ID NO: 3784 - DNA, 20 bp, Artificial Sequence
  Synthetic: rene_3782_NTC
ttgatatctggattagcgct

SEQ ID NO: 3785 - DNA, 20 bp, Artificial Sequence
  Synthetic: rene_3783_NTC
tcgcggaaaaaacagacacc

SEQ ID NO: 3786 - DNA, 20 bp, Artificial Sequence
  Synthetic: rene_3784_NTC
gcgggtccacatccggagat

SEQ ID NO: 3787 - DNA, 20 bp, Artificial Sequence
  Synthetic: rene_3785_NTC
gttctaatttgcgctccgct

SEQ ID NO: 3788 - DNA, 20 bp, Artificial Sequence
  Synthetic: rene_3786_NTC
gttacgttctttgcagcgga

SEQ ID NO: 3789 - DNA, 20 bp, Artificial Sequence
  Synthetic: rene_3787_NTC
ctaataataactttacgacg

SEQ ID NO: 3790 - DNA, 20 bp, Artificial Sequence
  Synthetic: rene_3788_NTC
ggattgctgggcttggcatc

SEQ ID NO: 3791 - DNA, 20 bp, Artificial Sequence
  Synthetic: rene_3789_NTC
ggcatgtaagtttcaagaat

SEQ ID NO: 3792 - DNA, 20 bp, Artificial Sequence
  Synthetic: rene_3790_NTC
tcgcaaagaagtaggtagcc

SEQ ID NO: 3793 - DNA, 20 bp, Artificial Sequence
  Synthetic: rene_3791_NTC
atacttaaggcttacctagt

SEQ ID NO: 3794 - DNA, 20 bp, Artificial Sequence
  Synthetic: rene_3792_NTC
ccttactcataggtcttgta

SEQ ID NO: 3795 - DNA, 20 bp, Artificial Sequence
  Synthetic: rene_3793_NTC
gtcgttgggttcatggcatc

SEQ ID NO: 3796 - DNA, 20 bp, Artificial Sequence
  Synthetic: rene_3794_NTC
ctgccccattagtacttggc

SEQ ID NO: 3797 - DNA, 20 bp, Artificial Sequence
  Synthetic: rene_3795_NTC
tcggacaaatggcttcacgg

SEQ ID NO: 3798 - DNA, 20 bp, Artificial Sequence
  Synthetic: rene_3796_NTC
accgtcagtactccgtgaga

SEQ ID NO: 3799 - DNA, 20 bp, Artificial Sequence
  Synthetic: rene_3797_NTC
acttccgacggcacctttgg

SEQ ID NO: 3800 - DNA, 20 bp, Artificial Sequence
  Synthetic: rene_3798_NTC
cgggttgtcgttgcattcca

SEQ ID NO: 3801 - DNA, 20 bp, Artificial Sequence
  Synthetic: rene_3799_NTC
atccgtggtcctgatggatt

SEQ ID NO: 3802 - DNA, 20 bp, Artificial Sequence
  Synthetic: rene_3800_NTC
tgttgggtctccttattggg

SEQ ID NO: 3803 - DNA, 20 bp, Artificial Sequence
  Synthetic: rene_3801_NTC
ggcgcagacgagctgctatt

SEQ ID NO: 3804 - DNA, 20 bp, Artificial Sequence
  Synthetic: rene_3802_NTC
cgtcaggccttgcgggttgg

SEQ ID NO: 3805 - DNA, 20 bp, Artificial Sequence
  Synthetic: rene_3803_NTC
tcggatgggcctcgcccgct

SEQ ID NO: 3806 - DNA, 20 bp, Artificial Sequence
  Synthetic: rene_3804_NTC
ttgccactgactaagacgca

SEQ ID NO: 3807 - DNA, 20 bp, Artificial Sequence
  Synthetic: rene_3805_NTC
tagcaaaacattgaatcgga

SEQ ID NO: 3808 - DNA, 20 bp, Artificial Sequence
  Synthetic: rene_3806_NTC
catgcagactcaattcggaa

SEQ ID NO: 3809 - DNA, 20 bp, Artificial Sequence
  Synthetic: rene_3807_NTC
tctattgtgtaaacttctgc

SEQ ID NO: 3810 - DNA, 20 bp, Artificial Sequence
  Synthetic: rene_3808_NTC
atagtaaggtcctttgttct

SEQ ID NO: 3811 - DNA, 20 bp, Artificial Sequence
  Synthetic: rene_3809_NTC
gagttatagagccgagtgcc

SEQ ID NO: 3812 - DNA, 20 bp, Artificial Sequence
  Synthetic: rene_3810_NTC
ccgggtactgttcaatcgac

SEQ ID NO: 3813 - DNA, 20 bp, Artificial Sequence
  Synthetic: rene_3811_NTC
acgacatagtaaagccagtc

SEQ ID NO: 3814 - DNA, 20 bp, Artificial Sequence
  Synthetic: rene_3812_NTC
ttgaatcccatggtaaaacc

SEQ ID NO: 3815 - DNA, 20 bp, Artificial Sequence
  Synthetic: rene_3813_NTC
acacccgaaataaggtggtt

SEQ ID NO: 3816 - DNA, 20 bp, Artificial Sequence
  Synthetic: rene_3814_NTC
ctttgaaccgaagttcggcc

SEQ ID NO: 3817 - DNA, 20 bp, Artificial Sequence
  Synthetic: rene_3815_NTC
tgcgcatccctcttcaatgc

SEQ ID NO: 3818 - DNA, 20 bp, Artificial Sequence
  Synthetic: rene_3816_NTC
aagtggacacccgcatacag

SEQ ID NO: 3819 - DNA, 20 bp, Artificial Sequence
  Synthetic: rene_3817_NTC
aacgcgtccagtcgaacgcg

SEQ ID NO: 3820 - DNA, 20 bp, Artificial Sequence
  Synthetic: rene_3818_NTC
tatcaattagtttcatgtat

SEQ ID NO: 3821 - DNA, 20 bp, Artificial Sequence
  Synthetic: rene_3819_NTC
attcgttcgtctcagagaag

SEQ ID NO: 3822 - DNA, 20 bp, Artificial Sequence
  Synthetic: rene_3820_NTC
agtgtttgcattagtgtagt

SEQ ID NO: 3823 - DNA, 20 bp, Artificial Sequence
  Synthetic: rene_3821_NTC
gcgagtattgctcgttttag

SEQ ID NO: 3824 - DNA, 20 bp, Artificial Sequence
  Synthetic: rene_3822_NTC
caacactaattaaggccccc

SEQ ID NO: 3825 - DNA, 20 bp, Artificial Sequence
  Synthetic: rene_3823_NTC
taatccggagcggtcaggga

SEQ ID NO: 3826 - DNA, 20 bp, Artificial Sequence
  Synthetic: rene_3824_NTC
agctgagggaatttcgcgcg

SEQ ID NO: 3827 - DNA, 20 bp, Artificial Sequence
  Synthetic: rene_3825_NTC
gggttgtccgcgggcagggg

SEQ ID NO: 3828 - DNA, 20 bp, Artificial Sequence
  Synthetic: rene_3826_NTC
ccttttttcacagccacatt

SEQ ID NO: 3829 - DNA, 20 bp, Artificial Sequence
  Synthetic: rene_3827_NTC
gaacatacaatcaaaagatt

SEQ ID NO: 3830 - DNA, 20 bp, Artificial Sequence
  Synthetic: rene_3828_NTC
cactcataagaagcagatcc

SEQ ID NO: 3831 - DNA, 20 bp, Artificial Sequence
  Synthetic: rene_3829_NTC
tattctaatctgactatctc

SEQ ID NO: 3832 - DNA, 20 bp, Artificial Sequence
  Synthetic: rene_3830_NTC
taattccgccttggtacccg

SEQ ID NO: 3833 - DNA, 20 bp, Artificial Sequence
  Synthetic: rene_3831_NTC
agcctgggctagctgtagtg

SEQ ID NO: 3834 - DNA, 20 bp, Artificial Sequence
  Synthetic: rene_3832_NTC
agttccaaaaagccgctgcc

SEQ ID NO: 3835 - DNA, 20 bp, Artificial Sequence
  Synthetic: rene_3833_NTC
tcttcgattacagcgcctcg

SEQ ID NO: 3836 - DNA, 20 bp, Artificial Sequence
  Synthetic: rene_3834_NTC
cacatcatggtaagttgctt

SEQ ID NO: 3837 - DNA, 20 bp, Artificial Sequence
  Synthetic: rene_3835_NTC
gccgggcgggatcaaaggtc

SEQ ID NO: 3838 - DNA, 20 bp, Artificial Sequence
  Synthetic: rene_3836_NTC
cttctagagattgcaaagta

SEQ ID NO: 3839 - DNA, 20 bp, Artificial Sequence
  Synthetic: rene_3837_NTC
agggcgcagctcgttagtca

SEQ ID NO: 3840 - DNA, 20 bp, Artificial Sequence
  Synthetic: rene_3838_NTC
atatgggacgaactagatga

SEQ ID NO: 3841 - DNA, 20 bp, Artificial Sequence
  Synthetic: rene_3839_NTC
tagccaacaccgtacataac

SEQ ID NO: 3842 - DNA, 20 bp, Artificial Sequence
  Synthetic: rene_3840_NTC
aagagcattgcccgggctgt

SEQ ID NO: 3843 - DNA, 20 bp, Artificial Sequence
  Synthetic: rene_3841_NTC
gatacttgtttccaaagttc

SEQ ID NO: 3844 - DNA, 20 bp, Artificial Sequence
  Synthetic: rene_3842_NTC
gagaatgatccccttacgag

SEQ ID NO: 3845 - DNA, 20 bp, Artificial Sequence
  Synthetic: rene_3843_NTC
gtcttgtactagcctgaagg

SEQ ID NO: 3846 - DNA, 20 bp, Artificial Sequence
  Synthetic: rene_3844_NTC
cacacattctcgctgtcggc

SEQ ID NO: 3847 - DNA, 20 bp, Artificial Sequence
  Synthetic: rene_3845_NTC
gtgtactattgggctctgcc

SEQ ID NO: 3848 - DNA, 20 bp, Artificial Sequence
  Synthetic: rene_3846_NTC
tgtcttgaccctggcgaatg

SEQ ID NO: 3849 - DNA, 20 bp, Artificial Sequence
  Synthetic: rene_3847_NTC
tcgtgcatccacggtgtctt

SEQ ID NO: 3850 - DNA, 20 bp, Artificial Sequence
  Synthetic: rene_3848_NTC
gtatgcttttgtgtagtaga

SEQ ID NO: 3851 - DNA, 20 bp, Artificial Sequence
  Synthetic: rene_3849_NTC
agtctcctctgtgtggagtc

SEQ ID NO: 3852 - DNA, 20 bp, Artificial Sequence
  Synthetic: rene_3850_NTC
acaaataagaagcttcagac

SEQ ID NO: 3853 - DNA, 20 bp, Artificial Sequence
  Synthetic: rene_3851_NTC
cgtagctaccgccctcctgg

SEQ ID NO: 3854 - DNA, 20 bp, Artificial Sequence
  Synthetic: rene_3852_NTC
aagtcgcgagtagaaggcga

SEQ ID NO: 3855 - DNA, 20 bp, Artificial Sequence
  Synthetic: rene_3853_NTC
ggtcggggagtcatccactt

SEQ ID NO: 3856 - DNA, 20 bp, Artificial Sequence
  Synthetic: rene_3854_NTC
tctttggcaaaacctcgact

SEQ ID NO: 3857 - DNA, 20 bp, Artificial Sequence
  Synthetic: rene_3855_NTC
gtggccccaacatccatcta

SEQ ID NO: 3858 - DNA, 20 bp, Artificial Sequence
  Synthetic: rene_3856_NTC
ccgtgcattgccatcagata

SEQ ID NO: 3859 - DNA, 20 bp, Artificial Sequence
  Synthetic: rene_3857_NTC
gagtgtatgatcagagtcct

SEQ ID NO: 3860 - DNA, 20 bp, Artificial Sequence
  Synthetic: rene_3858_NTC
tatcgaccgatagctggact

SEQ ID NO: 3861 - DNA, 20 bp, Artificial Sequence
  Synthetic: rene_3859_NTC
agtaccgtgtgttggacctt

SEQ ID NO: 3862 - DNA, 20 bp, Artificial Sequence
  Synthetic: rene_3860_NTC
gttgggagatcctcatggag

SEQ ID NO: 3863 - DNA, 20 bp, Artificial Sequence
  Synthetic: rene_3861_NTC
agagatgcggtacactcaca

SEQ ID NO: 3864 - DNA, 20 bp, Artificial Sequence
  Synthetic: rene_3862_NTC
atggtaaaatggccccgaac

SEQ ID NO: 3865 - DNA, 20 bp, Artificial Sequence
  Synthetic: rene_3863_NTC
gccagtgagccgtcttctgt

SEQ ID NO: 3866 - DNA, 20 bp, Artificial Sequence
  Synthetic: rene_3864_NTC
ttctaccaaccgatgtgcag

SEQ ID NO: 3867 - DNA, 20 bp, Artificial Sequence
  Synthetic: rene_3865_NTC
gtgagctatctgtcaaccga

SEQ ID NO: 3868 - DNA, 20 bp, Artificial Sequence
  Synthetic: rene_3866_NTC
tgccagatgattacggtaga

SEQ ID NO: 3869 - DNA, 20 bp, Artificial Sequence
  Synthetic: rene_3867_NTC
tccgctgttgacggatactg

SEQ ID NO: 3870 - DNA, 20 bp, Artificial Sequence
  Synthetic: rene_3868_NTC
aattcactacggcaataaca

SEQ ID NO: 3871 - DNA, 20 bp, Artificial Sequence
  Synthetic: rene_3869_NTC
gcccacgggtgtgcctcggt

SEQ ID NO: 3872 - DNA, 20 bp, Artificial Sequence
  Synthetic: rene_3870_NTC
aagtcggtctttgctttgat

SEQ ID NO: 3873 - DNA, 20 bp, Artificial Sequence
  Synthetic: rene_3871_NTC
ctgtatggagtgttttgggt

SEQ ID NO: 3874 - DNA, 20 bp, Artificial Sequence
  Synthetic: rene_3872_NTC
tattataaatcaaactacgt

SEQ ID NO: 3875 - DNA, 20 bp, Artificial Sequence
  Synthetic: rene_3873_NTC
aacccgcggatgcgaatgtg

SEQ ID NO: 3876 - DNA, 20 bp, Artificial Sequence
  Synthetic: rene_3874_NTC
tcgtggggcattcaagaatt

SEQ ID NO: 3877 - DNA, 20 bp, Artificial Sequence
  Synthetic: rene_3875_NTC
tccactcaaacagcacaaac

SEQ ID NO: 3878 - DNA, 20 bp, Artificial Sequence
  Synthetic: rene_3876_NTC
tcaataagggacagctgacc

SEQ ID NO: 3879 - DNA, 20 bp, Artificial Sequence
  Synthetic: rene_3877_NTC
cctttatacgggtcctcaat

SEQ ID NO: 3880 - DNA, 20 bp, Artificial Sequence
  Synthetic: rene_3878_NTC
tattttctcgtcatagtagc

SEQ ID NO: 3881 - DNA, 20 bp, Artificial Sequence
  Synthetic: rene_3879_NTC
tcgtcaatccatcctccggg

SEQ ID NO: 3882 - DNA, 20 bp, Artificial Sequence
  Synthetic: rene_3880_NTC
gtctattccaagttggtgcg

SEQ ID NO: 3883 - DNA, 20 bp, Artificial Sequence
  Synthetic: rene_3881_NTC
ttcgaatctgagggtcggtt

SEQ ID NO: 3884 - DNA, 20 bp, Artificial Sequence
  Synthetic: rene_3882_NTC
catcagtaaaatgtcattcc

SEQ ID NO: 3885 - DNA, 20 bp, Artificial Sequence
  Synthetic: rene_3883_NTC
tcgcgtcactgaacgaaata

SEQ ID NO: 3886 - DNA, 20 bp, Artificial Sequence
  Synthetic: rene_3884_NTC
cgggatacgtgtaaggcggg

SEQ ID NO: 3887 - DNA, 20 bp, Artificial Sequence
  Synthetic: rene_3885_NTC
tcgcccgcgtaggcctgtgc

SEQ ID NO: 3888 - DNA, 20 bp, Artificial Sequence
  Synthetic: rene_3886_NTC
ttcagctctgaccagcaact

SEQ ID NO: 3889 - DNA, 20 bp, Artificial Sequence
  Synthetic: rene_3887_NTC
ttaatcggcggtgcttggaa

SEQ ID NO: 3890 - DNA, 20 bp, Artificial Sequence
  Synthetic: rene_3888_NTC
gaaagctttcgcttgtttcg

SEQ ID NO: 3891 - DNA, 20 bp, Artificial Sequence
  Synthetic: rene_3889_NTC
gaggaaagagggtagctatc

SEQ ID NO: 3892 - DNA, 20 bp, Artificial Sequence
  Synthetic: rene_3890_NTC
tctggccgtctccgaagcat

SEQ ID NO: 3893 - DNA, 20 bp, Artificial Sequence
  Synthetic: rene_3891_NTC
aggctgctggtactcgtcaa

SEQ ID NO: 3894 - DNA, 20 bp, Artificial Sequence
  Synthetic: rene_3892_NTC
aacccggtctgtgcagccat

SEQ ID NO: 3895 - DNA, 20 bp, Artificial Sequence
  Synthetic: rene_3893_NTC
gtattaccagatgcggttat

SEQ ID NO: 3896 - DNA, 20 bp, Artificial Sequence
  Synthetic: rene_3894_NTC
cgatgcaggtccgtcccccc

SEQ ID NO: 3897 - DNA, 20 bp, Artificial Sequence
  Synthetic: rene_3895_NTC
gaggaaatgtgagatcgtcc

SEQ ID NO: 3898 - DNA, 20 bp, Artificial Sequence
  Synthetic: rene_3896_NTC
attcaatgaccccgatgtgc

SEQ ID NO: 3899 - DNA, 20 bp, Artificial Sequence
  Synthetic: rene_3897_NTC
aggaaacacccgaataggtt

SEQ ID NO: 3900 - DNA, 20 bp, Artificial Sequence
  Synthetic: rene_3898_NTC
ccccccctgtgcgagcggcg

SEQ ID NO: 3901 - DNA, 20 bp, Artificial Sequence
  Synthetic: rene_3899_NTC
ttttagcttgaagatatctt

SEQ ID NO: 3902 - DNA, 20 bp, Artificial Sequence
  Synthetic: rene_3900_NTC
gacggatcggctggtaggtg

SEQ ID NO: 3903 - DNA, 20 bp, Artificial Sequence
  Synthetic: rene_3901_NTC
ccattctggatttttatttc

SEQ ID NO: 3904 - DNA, 20 bp, Artificial Sequence
  Synthetic: rene_3902_NTC
ccgtaggaccgggagaggag

SEQ ID NO: 3905 - DNA, 20 bp, Artificial Sequence
  Synthetic: rene_3903_NTC
ttgacacgattatctatgat

SEQ ID NO: 3906 - DNA, 20 bp, Artificial Sequence
  Synthetic: rene_3904_NTC
gggatgctctatcttctgat

SEQ ID NO: 3907 - DNA, 20 bp, Artificial Sequence
  Synthetic: rene_3905_NTC
ctgttagaacattacttaat

SEQ ID NO: 3908 - DNA, 20 bp, Artificial Sequence
  Synthetic: rene_3906_NTC
ctcccctctatccctccagg

SEQ ID NO: 3909 - DNA, 20 bp, Artificial Sequence
  Synthetic: rene_3907_NTC
cacaataaccttagcataaa

SEQ ID NO: 3910 - DNA, 20 bp, Artificial Sequence
  Synthetic: rene_3908_NTC
attgtatggctaattggctc

SEQ ID NO: 3911 - DNA, 20 bp, Artificial Sequence
  Synthetic: rene_3909_NTC
agtcggccagacacatgctt

SEQ ID NO: 3912 - DNA, 20 bp, Artificial Sequence
  Synthetic: rene_3910_NTC
cttgtgcccaggtcggcctt

SEQ ID NO: 3913 - DNA, 20 bp, Artificial Sequence
  Synthetic: rene_3911_NTC
tatgccgaagacaggctatc

SEQ ID NO: 3914 - DNA, 20 bp, Artificial Sequence
  Synthetic: rene_3912_NTC
gtgcctctgaaattaaacca

SEQ ID NO: 3915 - DNA, 20 bp, Artificial Sequence
  Synthetic: rene_3913_NTC
attgagaggcgatctctttc

SEQ ID NO: 3916 - DNA, 20 bp, Artificial Sequence
  Synthetic: rene_3914_NTC
aacatatatagggtcgttga

SEQ ID NO: 3917 - DNA, 20 bp, Artificial Sequence
  Synthetic: rene_3915_NTC
actattcgccagccgctggc

SEQ ID NO: 3918 - DNA, 20 bp, Artificial Sequence
  Synthetic: rene_3916_NTC
catctaggtttgcactgggt

SEQ ID NO: 3919 - DNA, 20 bp, Artificial Sequence
  Synthetic: rene_3917_NTC
catgtctatcctggtgggct

SEQ ID NO: 3920 - DNA, 20 bp, Artificial Sequence
  Synthetic: rene_3918_NTC
gctataccgtgccggtcgga

SEQ ID NO: 3921 - DNA, 20 bp, Artificial Sequence
  Synthetic: rene_3919_NTC
tatatgcacttgtccctcat

SEQ ID NO: 3922 - DNA, 20 bp, Artificial Sequence
  Synthetic: rene_3920_NTC
cccatcgaatgcggcgcgtc

SEQ ID NO: 3923 - DNA, 20 bp, Artificial Sequence
  Synthetic: rene_3921_NTC
gtctccggtatctggagggg

SEQ ID NO: 3924 - DNA, 20 bp, Artificial Sequence
  Synthetic: rene_3922_NTC
ctcatgatccacatagacaa

SEQ ID NO: 3925 - DNA, 20 bp, Artificial Sequence
  Synthetic: rene_3923_NTC
aataatcgtatagggtgcat

SEQ ID NO: 3926 - DNA, 20 bp, Artificial Sequence
  Synthetic: rene_3924_NTC
ttaatagtgttccacgtacc

SEQ ID NO: 3927 - DNA, 20 bp, Artificial Sequence
  Synthetic: rene_3925_NTC
gtactaacgtgtgtaagatg

SEQ ID NO: 3928 - DNA, 20 bp, Artificial Sequence
  Synthetic: rene_3926_NTC
gcaaaagtagttcagctgga

SEQ ID NO: 3929 - DNA, 20 bp, Artificial Sequence
  Synthetic: rene_3927_NTC
ccccgagagttactcttcat

SEQ ID NO: 3930 - DNA, 20 bp, Artificial Sequence
  Synthetic: rene_3928_NTC
acttttgcagggagcattaa

SEQ ID NO: 3931 - DNA, 20 bp, Artificial Sequence
  Synthetic: rene_3929_NTC
gctggcgaagtctcaatccg

SEQ ID NO: 3932 - DNA, 20 bp, Artificial Sequence
  Synthetic: rene_3930_NTC
tttttggcgcgcagttgtca

SEQ ID NO: 3933 - DNA, 20 bp, Artificial Sequence
  Synthetic: rene_3931_NTC
cgaatgagggcagttgatcc

SEQ ID NO: 3934 - DNA, 20 bp, Artificial Sequence
  Synthetic: rene_3932_NTC
gtctcctaaaggtgtatgcg

SEQ ID NO: 3935 - DNA, 20 bp, Artificial Sequence
  Synthetic: rene_3933_NTC
gaagggtcgtcgatcaggag

SEQ ID NO: 3936 - DNA, 20 bp, Artificial Sequence
  Synthetic: rene_3934_NTC
cacgccattcgttgattgga

SEQ ID NO: 3937 - DNA, 20 bp, Artificial Sequence
  Synthetic: rene_3935_NTC
ttgtttcaagaaagtacgcc

SEQ ID NO: 3938 - DNA, 20 bp, Artificial Sequence
  Synthetic: rene_3936_NTC
gctctatgctgcgaataggt

SEQ ID NO: 3939 - DNA, 20 bp, Artificial Sequence
  Synthetic: rene_3937_NTC
tgaggtgtcccacaagtttc

SEQ ID NO: 3940 - DNA, 20 bp, Artificial Sequence
  Synthetic: rene_3938_NTC
gtcgtgtgattcaatggttg

SEQ ID NO: 3941 - DNA, 20 bp, Artificial Sequence
  Synthetic: rene_3939_NTC
cagcgacggcccggtgtgtg

SEQ ID NO: 3942 - DNA, 20 bp, Artificial Sequence
  Synthetic: rene_3940_NTC
attgattttagagggcgtga

SEQ ID NO: 3943 - DNA, 20 bp, Artificial Sequence
  Synthetic: rene_3941_NTC
attgattgcctcagttgacg

SEQ ID NO: 3944 - DNA, 20 bp, Artificial Sequence
  Synthetic: rene_3942_NTC
atttcaaagcctgttttgat

SEQ ID NO: 3945 - DNA, 20 bp, Artificial Sequence
  Synthetic: rene_3943_NTC
cggataggatgtaaccatca

SEQ ID NO: 3946 - DNA, 20 bp, Artificial Sequence
  Synthetic: rene_3944_NTC
aaggacatgatagtttacac

SEQ ID NO: 3947 - DNA, 20 bp, Artificial Sequence
  Synthetic: rene_3945_NTC
agttgggagagcctacggga

SEQ ID NO: 3948 - DNA, 20 bp, Artificial Sequence
  Synthetic: rene_3946_NTC
cacgaccacctgattttagt

SEQ ID NO: 3949 - DNA, 20 bp, Artificial Sequence
  Synthetic: rene_3947_NTC
atcggttacacattatagcg

SEQ ID NO: 3950 - DNA, 20 bp, Artificial Sequence
  Synthetic: rene_3948_NTC
gctaggaaagtgtgtcatga

SEQ ID NO: 3951 - DNA, 20 bp, Artificial Sequence
  Synthetic: rene_3949_NTC
caccaccgagacgtcggtag

SEQ ID NO: 3952 - DNA, 20 bp, Artificial Sequence
  Synthetic: rene_3950_NTC
tgaataaaataacctgcatt

SEQ ID NO: 3953 - DNA, 20 bp, Artificial Sequence
  Synthetic: rene_3951_NTC
ccagagagtgatgtcgctaa

SEQ ID NO: 3954 - DNA, 20 bp, Artificial Sequence
  Synthetic: rene_3952_NTC
gactgccgggactagccccc

SEQ ID NO: 3955 - DNA, 20 bp, Artificial Sequence
  Synthetic: rene_3953_NTC
agatgacaacaggcggatcg

SEQ ID NO: 3956 - DNA, 20 bp, Artificial Sequence
  Synthetic: rene_3954_NTC
ctctacgctcgacaatggtt

SEQ ID NO: 3957 - DNA, 20 bp, Artificial Sequence
  Synthetic: rene_3955_NTC
ttttaaaggtcttagtcatt

SEQ ID NO: 3958 - DNA, 20 bp, Artificial Sequence
  Synthetic: rene_3956_NTC
gctgcgaagataaacgcact

SEQ ID NO: 3959 - DNA, 20 bp, Artificial Sequence
  Synthetic: rene_3957_NTC
agggtatcctgacgttgaca

SEQ ID NO: 3960 - DNA, 20 bp, Artificial Sequence
  Synthetic: rene_3958_NTC
cttcagcatccgggccctca

SEQ ID NO: 3961 - DNA, 20 bp, Artificial Sequence
  Synthetic: rene_3959_NTC
tttttaccgtatacaggcgt

SEQ ID NO: 3962 - DNA, 20 bp, Artificial Sequence
  Synthetic: rene_3960_NTC
aaaagcctcttcatgaccaa

SEQ ID NO: 3963 - DNA, 20 bp, Artificial Sequence
  Synthetic: rene_3961_NTC
accttagcattcctattgtt

SEQ ID NO: 3964 - DNA, 20 bp, Artificial Sequence
  Synthetic: rene_3962_NTC
aggcacattagtatggccgt

SEQ ID NO: 3965 - DNA, 20 bp, Artificial Sequence
  Synthetic: rene_3963_NTC
ttacttataacagcctgcac

SEQ ID NO: 3966 - DNA, 20 bp, Artificial Sequence
  Synthetic: rene_3964_NTC
ccgtatcaggtgctttgcgc

SEQ ID NO: 3967 - DNA, 20 bp, Artificial Sequence
  Synthetic: rene_3965_NTC
agagaatgtgcttgaatacg

SEQ ID NO: 3968 - DNA, 20 bp, Artificial Sequence
  Synthetic: rene_3966_NTC
cccacgagaatgtattgcaa

SEQ ID NO: 3969 - DNA, 20 bp, Artificial Sequence
  Synthetic: rene_3967_NTC
gccagtgcaagcagcctcgc

SEQ ID NO: 3970 - DNA, 20 bp, Artificial Sequence
  Synthetic: rene_3968_NTC
aagtcattagctcaggacga

SEQ ID NO: 3971 - DNA, 20 bp, Artificial Sequence
  Synthetic: rene_3969_NTC
atcacgtgcttcacaccagg

SEQ ID NO: 3972 - DNA, 20 bp, Artificial Sequence
  Synthetic: rene_3970_NTC
gtatctttataatcgtcctg

SEQ ID NO: 3973 - DNA, 20 bp, Artificial Sequence
  Synthetic: rene_3971_NTC
tgccgtccggagtcacagaa

SEQ ID NO: 3974 - DNA, 20 bp, Artificial Sequence
  Synthetic: rene_3972_NTC
atagtcccaccgggcttgta

SEQ ID NO: 3975 - DNA, 20 bp, Artificial Sequence
  Synthetic: rene_3973_NTC
ctaccttctgctatcatgtc

SEQ ID NO: 3976 - DNA, 20 bp, Artificial Sequence
  Synthetic: rene_3974_NTC
taacccacggggaacgttct

SEQ ID NO: 3977 - DNA, 20 bp, Artificial Sequence
  Synthetic: rene_3975_NTC
ctcagatggtaggctcgagc

SEQ ID NO: 3978 - DNA, 20 bp, Artificial Sequence
  Synthetic: rene_3976_NTC
atctgcgcgcgctagaagcg

SEQ ID NO: 3979 - DNA, 20 bp, Artificial Sequence
  Synthetic: rene_3977_NTC
ctcgcgggggaaaatccaac

SEQ ID NO: 3980 - DNA, 20 bp, Artificial Sequence
  Synthetic: rene_3978_NTC
ggaactatgatttccagatt

SEQ ID NO: 3981 - DNA, 20 bp, Artificial Sequence
  Synthetic: rene_3979_NTC
gcgataattattcgtagcac

SEQ ID NO: 3982 - DNA, 20 bp, Artificial Sequence
  Synthetic: rene_3980_NTC
ttcgttgctgtctttaccag

SEQ ID NO: 3983 - DNA, 20 bp, Artificial Sequence
  Synthetic: rene_3981_NTC
gggtattcggtcaaaagccc

SEQ ID NO: 3984 - DNA, 20 bp, Artificial Sequence
  Synthetic: rene_3982_NTC
cccatcctaaaggctgctcc

SEQ ID NO: 3985 - DNA, 20 bp, Artificial Sequence
  Synthetic: rene_3983_NTC
gacgtttaccgttgccggtt

SEQ ID NO: 3986 - DNA, 20 bp, Artificial Sequence
  Synthetic: rene_3984_NTC
tacaagcccggcttcagggg

SEQ ID NO: 3987 - DNA, 20 bp, Artificial Sequence
  Synthetic: rene_3985_NTC
tacggcatattgttcagtct

SEQ ID NO: 3988 - DNA, 20 bp, Artificial Sequence
  Synthetic: rene_3986_NTC
cttcaacaactagtcaagga

SEQ ID NO: 3989 - DNA, 20 bp, Artificial Sequence
  Synthetic: rene_3987_NTC
accagtcgtgtgccttagca

SEQ ID NO: 3990 - DNA, 20 bp, Artificial Sequence
  Synthetic: rene_3988_NTC
cagattgggctacaagccgg

SEQ ID NO: 3991 - DNA, 20 bp, Artificial Sequence
  Synthetic: rene_3989_NTC
gccacactcgccgaaagccg

SEQ ID NO: 3992 - DNA, 20 bp, Artificial Sequence
  Synthetic: rene_3990_NTC
cacccgctttttcacctgcg

SEQ ID NO: 3993 - DNA, 20 bp, Artificial Sequence
  Synthetic: rene_3991_NTC
tctgcttgcgtctagctagc

SEQ ID NO: 3994 - DNA, 20 bp, Artificial Sequence
  Synthetic: rene_3992_NTC
tacttcgtcgtacgggatgt

SEQ ID NO: 3995 - DNA, 20 bp, Artificial Sequence
  Synthetic: rene_3993_NTC
tcctagctccggcggtagcc

SEQ ID NO: 3996 - DNA, 20 bp, Artificial Sequence
  Synthetic: rene_3994_NTC
gagcagaagtagagtaggtc

SEQ ID NO: 3997 - DNA, 20 bp, Artificial Sequence
  Synthetic: rene_3995_NTC
atggtggctcgccgcccgag

SEQ ID NO: 3998 - DNA, 20 bp, Artificial Sequence
  Synthetic: rene_3996_NTC
cgaggatgtattaagatacg

SEQ ID NO: 3999 - DNA, 20 bp, Artificial Sequence
  Synthetic: rene_3997_NTC
gggtggtcgtcagctatgta

SEQ ID NO: 4000 - DNA, 20 bp, Artificial Sequence
  Synthetic: rene_3998_NTC
agtggccatttcccagactc

SEQ ID NO: 4001 - DNA, 20 bp, Artificial Sequence
  Synthetic: rene_3999_NTC
gtgttgtctcaggcgtttca

SEQ ID NO: 4002 - DNA, 20 bp, Artificial Sequence
  Synthetic: rene_4000_NTC
aggctatcccgaggggcccg

SEQ ID NO: 4003 - DNA, 20 bp, Artificial Sequence
  Synthetic: rene_4001_NTC
cctagtgagcattgagtttt

SEQ ID NO: 4004 - DNA, 20 bp, Artificial Sequence
  Synthetic: rene_4002_NTC
gggttaatgtcccgataccg

SEQ ID NO: 4005 - DNA, 20 bp, Artificial Sequence
  Synthetic: rene_4003_NTC
tatacaggggtctcgtagcg

SEQ ID NO: 4006 - DNA, 20 bp, Artificial Sequence
  Synthetic: rene_4004_NTC
gcgcttatcgtgtcattgga

SEQ ID NO: 4007 - DNA, 20 bp, Artificial Sequence
  Synthetic: rene_4005_NTC
gatagtccgccacctcccgc

SEQ ID NO: 4008 - DNA, 20 bp, Artificial Sequence
  Synthetic: rene_4006_NTC
agctgatgttcggaagctcc

SEQ ID NO: 4009 - DNA, 20 bp, Artificial Sequence
  Synthetic: rene_4007_NTC
cggttacagccggccacagc

SEQ ID NO: 4010 - DNA, 20 bp, Artificial Sequence
  Synthetic: rene_4008_NTC
cttgatgtacgcgcgggttc

SEQ ID NO: 4011 - DNA, 20 bp, Artificial Sequence
  Synthetic: rene_4009_NTC
tgacttatttatcactaccc

SEQ ID NO: 4012 - DNA, 20 bp, Artificial Sequence
  Synthetic: rene_4010_NTC
aggaatttgatagtcgaaat

SEQ ID NO: 4013 - DNA, 20 bp, Artificial Sequence
  Synthetic: rene_4011_NTC
aagatacagcgtcgcgtgcc

SEQ ID NO: 4014 - DNA, 20 bp, Artificial Sequence
  Synthetic: rene_4012_NTC
aaggccatttcagttaaatg

SEQ ID NO: 4015 - DNA, 20 bp, Artificial Sequence
  Synthetic: rene_4013_NTC
aaggtcattgcgtaagcggc

SEQ ID NO: 4016 - DNA, 20 bp, Artificial Sequence
  Synthetic: rene_4014_NTC
agttcagccaatcccctcta

SEQ ID NO: 4017 - DNA, 20 bp, Artificial Sequence
  Synthetic: rene_4015_NTC
cccctcgagcggcagccgat

SEQ ID NO: 4018 - DNA, 20 bp, Artificial Sequence
  Synthetic: rene_4016_NTC
cagcggggggtcttaattgt

SEQ ID NO: 4019 - DNA, 20 bp, Artificial Sequence
  Synthetic: rene_4017_NTC
cagttaaccgtgcgttaagt

SEQ ID NO: 4020 - DNA, 20 bp, Artificial Sequence
  Synthetic: rene_4018_NTC
tccggagactctcagtgcca

SEQ ID NO: 4021 - DNA, 20 bp, Artificial Sequence
  Synthetic: rene_4019_NTC
gactaatcactagacatgat

SEQ ID NO: 4022 - DNA, 20 bp, Artificial Sequence
  Synthetic: rene_4020_NTC
accgagcggggacacacctg

SEQ ID NO: 4023 - DNA, 20 bp, Artificial Sequence
  Synthetic: rene_4021_NTC
aacgcaagtgggtttcattg

SEQ ID NO: 4024 - DNA, 20 bp, Artificial Sequence
  Synthetic: rene_4022_NTC
atctgcttaattatactagg

SEQ ID NO: 4025 - DNA, 20 bp, Artificial Sequence
  Synthetic: rene_4023_NTC
atggatgtcccgcttgtttg

SEQ ID NO: 4026 - DNA, 20 bp, Artificial Sequence
  Synthetic: rene_4024_NTC
tcattgcactccgccctaac

SEQ ID NO: 4027 - DNA, 20 bp, Artificial Sequence
  Synthetic: rene_4025_NTC
taaggtttatcgccaggatg

SEQ ID NO: 4028 - DNA, 20 bp, Artificial Sequence
  Synthetic: rene_4026_NTC
ttacgagctcgcgctctcgg

SEQ ID NO: 4029 - DNA, 20 bp, Artificial Sequence
  Synthetic: rene_4027_NTC
tccacaaaaatttcctccgc

SEQ ID NO: 4030 - DNA, 20 bp, Artificial Sequence
  Synthetic: rene_4028_NTC
ttgactgccactgaacgccc

SEQ ID NO: 4031 - DNA, 20 bp, Artificial Sequence
  Synthetic: rene_4029_NTC
gtgagtgggcattttcacgt

SEQ ID NO: 4032 - DNA, 20 bp, Artificial Sequence
  Synthetic: rene_4030_NTC
tgcacctttagatgcagagg

SEQ ID NO: 4033 - DNA, 20 bp, Artificial Sequence
  Synthetic: rene_4031_NTC
cagaatggcagcagaatgtt

SEQ ID NO: 4034 - DNA, 20 bp, Artificial Sequence
  Synthetic: rene_4032_NTC
ctactcgcctgtcaagtgta

SEQ ID NO: 4035 - DNA, 20 bp, Artificial Sequence
  Synthetic: rene_4033_NTC
tactggtaacctgggaacgc

SEQ ID NO: 4036 - DNA, 20 bp, Artificial Sequence
  Synthetic: rene_4034_NTC
caggtatactaggaggggtc

SEQ ID NO: 4037 - DNA, 20 bp, Artificial Sequence
  Synthetic: rene_4035_NTC
gttagcgagttacaaactga

SEQ ID NO: 4038 - DNA, 20 bp, Artificial Sequence
  Synthetic: rene_4036_NTC
cttgcaatgcctagcacgct

SEQ ID NO: 4039 - DNA, 20 bp, Artificial Sequence
  Synthetic: rene_4037_NTC
cgacgcggctacccatgcca

SEQ ID NO: 4040 - DNA, 20 bp, Artificial Sequence
  Synthetic: rene_4038_NTC
cagttacttggattatccag

SEQ ID NO: 4041 - DNA, 20 bp, Artificial Sequence
  Synthetic: rene_4039_NTC
gaaaaccaagcccccgaaca

SEQ ID NO: 4042 - DNA, 20 bp, Artificial Sequence
  Synthetic: rene_4040_NTC
ataataagcagaaacgcata

SEQ ID NO: 4043 - DNA, 20 bp, Artificial Sequence
  Synthetic: rene_4041_NTC
tgtagtccggtaggcaaaaa

SEQ ID NO: 4044 - DNA, 20 bp, Artificial Sequence
  Synthetic: rene_4042_NTC
ctcttacattagtcatgtat

SEQ ID NO: 4045 - DNA, 20 bp, Artificial Sequence
  Synthetic: rene_4043_NTC
tagcctagccaaattgtgag

SEQ ID NO: 4046 - DNA, 20 bp, Artificial Sequence
  Synthetic: rene_4044_NTC
agacaacttcttcgctgcaa

SEQ ID NO: 4047 - DNA, 20 bp, Artificial Sequence
  Synthetic: rene_4045_NTC
tgatcagtcccttcgactac

SEQ ID NO: 4048 - DNA, 20 bp, Artificial Sequence
  Synthetic: rene_4046_NTC
tgctaatacacggccaagcc

SEQ ID NO: 4049 - DNA, 20 bp, Artificial Sequence
  Synthetic: rene_4047_NTC
atagtcgttgtaataatccc

SEQ ID NO: 4050 - DNA, 20 bp, Artificial Sequence
  Synthetic: rene_4048_NTC
tttatctaggaataccgacc

SEQ ID NO: 4051 - DNA, 20 bp, Artificial Sequence
  Synthetic: rene_4049_NTC
aatccggcatatacctacgc

SEQ ID NO: 4052 - DNA, 20 bp, Artificial Sequence
  Synthetic: rene_4050_NTC
tgatctcatcgtgtagctta

SEQ ID NO: 4053 - DNA, 20 bp, Artificial Sequence
  Synthetic: rene_4051_NTC
ttgaacggatcctgaacgcg

SEQ ID NO: 4054 - DNA, 20 bp, Artificial Sequence
  Synthetic: rene_4052_NTC
cgacacgatacacgttcttt

SEQ ID NO: 4055 - DNA, 20 bp, Artificial Sequence
  Synthetic: rene_4053_NTC
tgccctggtacatcgtttca

SEQ ID NO: 4056 - DNA, 20 bp, Artificial Sequence
  Synthetic: rene_4054_NTC
aaaagatgcataccttgcca

SEQ ID NO: 4057 - DNA, 20 bp, Artificial Sequence
  Synthetic: rene_4055_NTC
actcagaagcatatcaaaaa

SEQ ID NO: 4058 - DNA, 20 bp, Artificial Sequence
  Synthetic: rene_4056_NTC
ggcggaacgacccactcata

SEQ ID NO: 4059 - DNA, 20 bp, Artificial Sequence
  Synthetic: rene_4057_NTC
gccaccttcccgggttgcga

SEQ ID NO: 4060 - DNA, 20 bp, Artificial Sequence
  Synthetic: rene_4058_NTC
cctactccggaccgttaaag

SEQ ID NO: 4061 - DNA, 20 bp, Artificial Sequence
  Synthetic: rene_4059_NTC
cgcggactcttcccgattat

SEQ ID NO: 4062 - DNA, 20 bp, Artificial Sequence
  Synthetic: rene_4060_NTC
agctgatacattgaagaaag

SEQ ID NO: 4063 - DNA, 20 bp, Artificial Sequence
  Synthetic: rene_4061_NTC
tcaacgagccgctatgcctg

SEQ ID NO: 4064 - DNA, 20 bp, Artificial Sequence
  Synthetic: rene_4062_NTC
ttgagtagcctactactaat

SEQ ID NO: 4065 - DNA, 20 bp, Artificial Sequence
  Synthetic: rene_4063_NTC
cacggcccatgggtagggca

SEQ ID NO: 4066 - DNA, 20 bp, Artificial Sequence
  Synthetic: rene_4064_NTC
gggagggcaagagctcttga

SEQ ID NO: 4067 - DNA, 20 bp, Artificial Sequence
  Synthetic: rene_4065_NTC
aaactgggccccgacggtta

SEQ ID NO: 4068 - DNA, 20 bp, Artificial Sequence
  Synthetic: rene_4066_NTC
gatcggctccgaactcgttt

SEQ ID NO: 4069 - DNA, 20 bp, Artificial Sequence
  Synthetic: rene_4067_NTC
agagatataaaccgtcttcg

SEQ ID NO: 4070 - DNA, 20 bp, Artificial Sequence
  Synthetic: rene_4068_NTC
cgcgtagcaacgcgatagcg

SEQ ID NO: 4071 - DNA, 20 bp, Artificial Sequence
  Synthetic: rene_4069_NTC
aaagcacatttgatgaataa

SEQ ID NO: 4072 - DNA, 20 bp, Artificial Sequence
  Synthetic: rene_4070_NTC
ctgcgagctcttaacatcag

SEQ ID NO: 4073 - DNA, 20 bp, Artificial Sequence
  Synthetic: rene_4071_NTC
agcaaaggcaagctatgtct

SEQ ID NO: 4074 - DNA, 20 bp, Artificial Sequence
  Synthetic: rene_4072_NTC
gactcgaattttgtttgact

SEQ ID NO: 4075 - DNA, 20 bp, Artificial Sequence
  Synthetic: rene_4073_NTC
atttcgtgtcgagccctcac

SEQ ID NO: 4076 - DNA, 20 bp, Artificial Sequence
  Synthetic: rene_4074_NTC
aataggccgttgactgacga

SEQ ID NO: 4077 - DNA, 20 bp, Artificial Sequence
  Synthetic: rene_4075_NTC
attgggggatatatgattcg

SEQ ID NO: 4078 - DNA, 20 bp, Artificial Sequence
  Synthetic: rene_4076_NTC
tgacctcttctggcaattaa

SEQ ID NO: 4079 - DNA, 20 bp, Artificial Sequence
  Synthetic: rene_4077_NTC
aaggcttaacaatcactccg

SEQ ID NO: 4080 - DNA, 20 bp, Artificial Sequence
  Synthetic: rene_4078_NTC
gaaaagagtgtgtgatctct

SEQ ID NO: 4081 - DNA, 20 bp, Artificial Sequence
  Synthetic: rene_4079_NTC
taggcagctgggcgtccgga

SEQ ID NO: 4082 - DNA, 20 bp, Artificial Sequence
  Synthetic: rene_4080_NTC
gacaggtgcgcaactggaag

SEQ ID NO: 4083 - DNA, 20 bp, Artificial Sequence
  Synthetic: rene_4081_NTC
ctcccccgagcgtggaaatg

SEQ ID NO: 4084 - DNA, 20 bp, Artificial Sequence
  Synthetic: rene_4082_NTC
gtgtgggggttcatacagaa

SEQ ID NO: 4085 - DNA, 20 bp, Artificial Sequence
  Synthetic: rene_4083_NTC
ccctatgcacctcgatacgg

SEQ ID NO: 4086 - DNA, 20 bp, Artificial Sequence
  Synthetic: rene_4084_NTC
tcaagacggctacgcatgaa

SEQ ID NO: 4087 - DNA, 20 bp, Artificial Sequence
  Synthetic: rene_4085_NTC
ctgggtatatagtcgaaacc

SEQ ID NO: 4088 - DNA, 20 bp, Artificial Sequence
  Synthetic: descartes_0001_ABL1
actgggtccagcgagaaggt

SEQ ID NO: 4089 - DNA, 20 bp, Artificial Sequence
  Synthetic: descartes_0002_ABL1
ccttccgagaggccatcaac

SEQ ID NO: 4090 - DNA, 20 bp, Artificial Sequence
  Synthetic: descartes_0003_ABL1
gagggagcaatggagacacg

SEQ ID NO: 4091 - DNA, 20 bp, Artificial Sequence
  Synthetic: descartes_0004_ABL1
gcctgagcaggttgatgaca

SEQ ID NO: 4092 - DNA, 20 bp, Artificial Sequence
  Synthetic: descartes_0005_ABL1
cgaagagacactcgggttga

SEQ ID NO: 4093 - DNA, 20 bp, Artificial Sequence
  Synthetic: descartes_0006_ABL1
cccttgtccctccctggcga

SEQ ID NO: 4094 - DNA, 20 bp, Artificial Sequence
  Synthetic: descartes_0007_ABL1
gtttgggcttcacaccattc

SEQ ID NO: 4095 - DNA, 20 bp, Artificial Sequence
  Synthetic: descartes_0008_ABL1
ggaggggttggggctgtctt

SEQ ID NO: 4096 - DNA, 20 bp, Artificial Sequence
  Synthetic: descartes_0009_ACTN1
atagccagcaaaggcgtcaa

SEQ ID NO: 4097 - DNA, 20 bp, Artificial Sequence
  Synthetic: descartes_0010_ACTN1
cccgcatcatgagcattgtg

SEQ ID NO: 4098 - DNA, 20 bp, Artificial Sequence
  Synthetic: descartes_0011_ACTN1
gagcccaggccaatgtcatc

SEQ ID NO: 4099 - DNA, 20 bp, Artificial Sequence
  Synthetic: descartes_0012_ACTN1
gcttgtagttgacgatgctc

SEQ ID NO: 4100 - DNA, 20 bp, Artificial Sequence
  Synthetic: descartes_0013_ACTN1
tctgacaccacaggagcagc

SEQ ID NO: 4101 - DNA, 20 bp, Artificial Sequence
  Synthetic: descartes_0014_ACTN1
acgtggcagagaagtacctg

SEQ ID NO: 4102 - DNA, 20 bp, Artificial Sequence
  Synthetic: descartes_0015_ACTN1
acgcctttgctggctatgaa

SEQ ID NO: 4103 - DNA, 20 bp, Artificial Sequence
  Synthetic: descartes_0016_ACTN1
cgcgcctgcctgatctccat

SEQ ID NO: 4104 - DNA, 20 bp, Artificial Sequence
  Synthetic: descartes_0017_ADA
ctcccagaagatgaaaagag

SEQ ID NO: 4105 - DNA, 20 bp, Artificial Sequence
  Synthetic: descartes_0018_ADA
gccttcatctctacaaactc

SEQ ID NO: 4106 - DNA, 20 bp, Artificial Sequence
  Synthetic: descartes_0019_ADA
ctgccgcagcctgttataaa

SEQ ID NO: 4107 - DNA, 20 bp, Artificial Sequence
  Synthetic: descartes_0020_ADA
gtcatctggtaatcagtgtc

SEQ ID NO: 4108 - DNA, 20 bp, Artificial Sequence
  Synthetic: descartes_0021_ADA
aactcctcttcagtaaagcc

SEQ ID NO: 4109 - DNA, 20 bp, Artificial Sequence
  Synthetic: descartes_0022_ADA
atcttctgggaggaaactag

SEQ ID NO: 4110 - DNA, 20 bp, Artificial Sequence
  Synthetic: descartes_0023_ADA
aggcttgatggatccgtcta

SEQ ID NO: 4111 - DNA, 20 bp, Artificial Sequence
  Synthetic: descartes_0024_ADA
ctacttcggccgagcccacc

SEQ ID NO: 4112 - DNA, 20 bp, Artificial Sequence
  Synthetic: descartes_0025_ADAM15
gcaggtgctggaagtcccgg

SEQ ID NO: 4113 - DNA, 20 bp, Artificial Sequence
  Synthetic: descartes_0026_ADAM15
cctccagacagctaatactc

SEQ ID NO: 4114 - DNA, 20 bp, Artificial Sequence
  Synthetic: descartes_0027_ADAM15
ggctgatctccaccaggtca

SEQ ID NO: 4115 - DNA, 20 bp, Artificial Sequence
  Synthetic: descartes_0028_ADAM15
cctgggaatagctgcccctg

SEQ ID NO: 4116 - DNA, 20 bp, Artificial Sequence
  Synthetic: descartes_0029_ADAM15
gcgaatccaagatctccacc

SEQ ID NO: 4117 - DNA, 20 bp, Artificial Sequence
  Synthetic: descartes_0030_ADAM15
gagggtgacagctgggtttg

SEQ ID NO: 4118 - DNA, 20 bp, Artificial Sequence
  Synthetic: descartes_0031_ADAM15
ggagcggccaggaaggcaga

SEQ ID NO: 4119 - DNA, 20 bp, Artificial Sequence
  Synthetic: descartes_0032_ADAM15
tgggcagctccagtgccaga

SEQ ID NO: 4120 - DNA, 20 bp, Artificial Sequence
  Synthetic: descartes_0033_ADAM17
ggagcaactcttcattatcc

SEQ ID NO: 4121 - DNA, 20 bp, Artificial Sequence
  Synthetic: descartes_0034_ADAM17
ccatccaccaccacgacctt

SEQ ID NO: 4122 - DNA, 20 bp, Artificial Sequence
  Synthetic: descartes_0035_ADAM17
agaaggaccccttcccaaat

SEQ ID NO: 4123 - DNA, 20 bp, Artificial Sequence
  Synthetic: descartes_0036_ADAM17
attgaccagctgagcatcaa

SEQ ID NO: 4124 - DNA, 20 bp, Artificial Sequence
  Synthetic: descartes_0037_ADAM17
aattatacctgacatcaagt

SEQ ID NO: 4125 - DNA, 20 bp, Artificial Sequence
  Synthetic: descartes_0038_ADAM17
gatgcttcctcagctatatc

SEQ ID NO: 4126 - DNA, 20 bp, Artificial Sequence
  Synthetic: descartes_0039_ADAM17
gagactgcaaacgtgaaaca

SEQ ID NO: 4127 - DNA, 20 bp, Artificial Sequence
  Synthetic: descartes_0040_ADAM17
ccatccttacacttgccaag

SEQ ID NO: 4128 - DNA, 20 bp, Artificial Sequence
  Synthetic: descartes_0041_ADGRE1
ggatggagcgacacagcaga

SEQ ID NO: 4129 - DNA, 20 bp, Artificial Sequence
  Synthetic: descartes_0042_ADGRE1
tgaccatcaagaacagtatc

SEQ ID NO: 4130 - DNA, 20 bp, Artificial Sequence
  Synthetic: descartes_0043_ADGRE1
acagaccaaggagtggaatg

SEQ ID NO: 4131 - DNA, 20 bp, Artificial Sequence
  Synthetic: descartes_0044_ADGRE1
cagggacgtgtgcagctgag

SEQ ID NO: 4132 - DNA, 20 bp, Artificial Sequence
  Synthetic: descartes_0045_ADGRE1
ctgggacccagtcatttcca

SEQ ID NO: 4133 - DNA, 20 bp, Artificial Sequence
  Synthetic: descartes_0046_ADGRE1
cttgtacatcattagccatg

SEQ ID NO: 4134 - DNA, 20 bp, Artificial Sequence
  Synthetic: descartes_0047_ADGRE1
agaggcccatctgtgtttcc

SEQ ID NO: 4135 - DNA, 20 bp, Artificial Sequence
  Synthetic: descartes_0048_ADGRE1
tagagatgaatccaacttga

SEQ ID NO: 4136 - DNA, 20 bp, Artificial Sequence
  Synthetic: descartes_0049_ADGRG1
cctgcagcccaccctgcttc

SEQ ID NO: 4137 - DNA, 20 bp, Artificial Sequence
  Synthetic: descartes_0050_ADGRG1
gtgttctgtaccacaatccc

SEQ ID NO: 4138 - DNA, 20 bp, Artificial Sequence
  Synthetic: descartes_0051_ADGRG1
tctcctgacggtctcacacc

SEQ ID NO: 4139 - DNA, 20 bp, Artificial Sequence
  Synthetic: descartes_0052_ADGRG1
ggtttctctcctgacggtct

SEQ ID NO: 4140 - DNA, 20 bp, Artificial Sequence
  Synthetic: descartes_0053_ADGRG1
tgttcaacatggccatgcta

SEQ ID NO: 4141 - DNA, 20 bp, Artificial Sequence
  Synthetic: descartes_0054_ADGRG1
gcttctgcagccagcggaac

SEQ ID NO: 4142 - DNA, 20 bp, Artificial Sequence
  Synthetic: descartes_0055_ADGRG1
ggtgtgggggcgcagccgca

SEQ ID NO: 4143 - DNA, 20 bp, Artificial Sequence
  Synthetic: descartes_0056_ADGRG1
agctcgcacatgtccaccga

SEQ ID NO: 4144 - DNA, 20 bp, Artificial Sequence
  Synthetic: descartes_0057_ADRB3
gatgctggcggtcacacaca

SEQ ID NO: 4145 - DNA, 20 bp, Artificial Sequence
  Synthetic: descartes_0058_ADRB3
gtggtggctacgcgccagct

SEQ ID NO: 4146 - DNA, 20 bp, Artificial Sequence
  Synthetic: descartes_0059_ADRB3
cttgccctgaactggctagg

SEQ ID NO: 4147 - DNA, 20 bp, Artificial Sequence
  Synthetic: descartes_0060_ADRB3
gcagcgccttccgccgtctt

SEQ ID NO: 4148 - DNA, 20 bp, Artificial Sequence
  Synthetic: descartes_0061_ADRB3
cgcccatcatgagccagtgg

SEQ ID NO: 4149 - DNA, 20 bp, Artificial Sequence
  Synthetic: descartes_0062_ADRB3
tggccaacgtgctgcgcgcc

SEQ ID NO: 4150 - DNA, 20 bp, Artificial Sequence
  Synthetic: descartes_0063_ADRB3
cgcccgaggagtctccgccg

SEQ ID NO: 4151 - DNA, 20 bp, Artificial Sequence
  Synthetic: descartes_0064_AEBP2
gggaagggacacagtgttgt

SEQ ID NO: 4152 - DNA, 20 bp, Artificial Sequence
  Synthetic: descartes_0065_AEBP2
actgatgtcgttcactttca

SEQ ID NO: 4153 - DNA, 20 bp, Artificial Sequence
  Synthetic: descartes_0066_AEBP2
ggtccaaaagcaaggcagta

SEQ ID NO: 4154 - DNA, 20 bp, Artificial Sequence
  Synthetic: descartes_0067_AEBP2
actggtagatggagtgttat

SEQ ID NO: 4155 - DNA, 20 bp, Artificial Sequence
  Synthetic: descartes_0068_AEBP2
cttgaagaagtagtgcttcc

SEQ ID NO: 4156 - DNA, 20 bp, Artificial Sequence
  Synthetic: descartes_0069_AEBP2
tagccagccaaaggccaaag

SEQ ID NO: 4157 - DNA, 20 bp, Artificial Sequence
  Synthetic: descartes_0070_AEBP2
tatatgagctgagaggttaa

SEQ ID NO: 4158 - DNA, 20 bp, Artificial Sequence
  Synthetic: descartes_0071_AEBP2
acctctcagctcatatagaa

SEQ ID NO: 4159 - DNA, 20 bp, Artificial Sequence
  Synthetic: descartes_0072_AGER
ccacaagatgaccccaatga

SEQ ID NO: 4160 - DNA, 20 bp, Artificial Sequence
  Synthetic: descartes_0073_AGER
ataaagtcagggaagcagaa

SEQ ID NO: 4161 - DNA, 20 bp, Artificial Sequence
  Synthetic: descartes_0074_AGER
tcaaacccctcacctgcagt

SEQ ID NO: 4162 - DNA, 20 bp, Artificial Sequence
  Synthetic: descartes_0075_AGER
cggtgccaggcaatgaacag

SEQ ID NO: 4163 - DNA, 20 bp, Artificial Sequence
  Synthetic: descartes_0076_AGER
cattcctgttcattgcctgg

SEQ ID NO: 4164 - DNA, 20 bp, Artificial Sequence
  Synthetic: descartes_0077_AGER
ttgggggcccccttacactt

SEQ ID NO: 4165 - DNA, 20 bp, Artificial Sequence
  Synthetic: descartes_0078_AGER
cattccagccgctggggtgg

SEQ ID NO: 4166 - DNA, 20 bp, Artificial Sequence
  Synthetic: descartes_0079_AGER
ctggggcccgtggctggaat

SEQ ID NO: 4167 - DNA, 20 bp, Artificial Sequence
  Synthetic: descartes_0080_AGFG1
cccacagcaagtcactctcc

SEQ ID NO: 4168 - DNA, 20 bp, Artificial Sequence
  Synthetic: descartes_0081_AGFG1
cagactgcagacaaatatgc

SEQ ID NO: 4169 - DNA, 20 bp, Artificial Sequence
  Synthetic: descartes_0082_AGFG1
gaggtttccccacagcaagt

SEQ ID NO: 4170 - DNA, 20 bp, Artificial Sequence
  Synthetic: descartes_0083_AGFG1
agaccaatgccagaggagca

SEQ ID NO: 4171 - DNA, 20 bp, Artificial Sequence
  Synthetic: descartes_0084_AGFG1
cctgtggtcccaaagccact

SEQ ID NO: 4172 - DNA, 20 bp, Artificial Sequence
  Synthetic: descartes_0085_AGFG1
caacaggaagctcatcaacc

SEQ ID NO: 4173 - DNA, 20 bp, Artificial Sequence
  Synthetic: descartes_0086_AGFG1
agttctgcagccacctccag

SEQ ID NO: 4174 - DNA, 20 bp, Artificial Sequence
  Synthetic: descartes_0087_AGFG1
ggaccacaggtaaagctcct

SEQ ID NO: 4175 - DNA, 20 bp, Artificial Sequence
  Synthetic: descartes_0088_AHR
agagaaggcctgaacttaca

SEQ ID NO: 4176 - DNA, 20 bp, Artificial Sequence
  Synthetic: descartes_0089_AHR
ggatatactgaagcagagct

SEQ ID NO: 4177 - DNA, 20 bp, Artificial Sequence
  Synthetic: descartes_0090_AHR
aatgaaacatatccagctga

SEQ ID NO: 4178 - DNA, 20 bp, Artificial Sequence
  Synthetic: descartes_0091_AHR
gaaccaaacacaaactagac

SEQ ID NO: 4179 - DNA, 20 bp, Artificial Sequence
  Synthetic: descartes_0092_AHR
gctagcctgctgcctttccc

SEQ ID NO: 4180 - DNA, 20 bp, Artificial Sequence
  Synthetic: descartes_0093_AHR
attatgctgtacaagtcact

SEQ ID NO: 4181 - DNA, 20 bp, Artificial Sequence
  Synthetic: descartes_0094_AHR
ctgtaatcagcctgtattac

SEQ ID NO: 4182 - DNA, 20 bp, Artificial Sequence
  Synthetic: descartes_0095_AHR
taagaagccggaaaactatc

SEQ ID NO: 4183 - DNA, 20 bp, Artificial Sequence
  Synthetic: descartes_0096_AICDA
atgcagcccttcccaggctt

SEQ ID NO: 4184 - DNA, 20 bp, Artificial Sequence
  Synthetic: descartes_0097_AICDA
tacaaaagtattccagcagt

SEQ ID NO: 4185 - DNA, 20 bp, Artificial Sequence
  Synthetic: descartes_0098_AICDA
tgcgagggaaccccaacctc

SEQ ID NO: 4186 - DNA, 20 bp, Artificial Sequence
  Synthetic: descartes_0099_AICDA
actggactttggttatcttc

SEQ ID NO: 4187 - DNA, 20 bp, Artificial Sequence
  Synthetic: descartes_0100_AICDA
tagaaaaccacgaaagaact

SEQ ID NO: 4188 - DNA, 20 bp, Artificial Sequence
  Synthetic: descartes_0101_AICDA
aattggtaaagaaacttcct

SEQ ID NO: 4189 - DNA, 20 bp, Artificial Sequence
  Synthetic: descartes_0102_AICDA
aaagcctgggaagggctgca

SEQ ID NO: 4190 - DNA, 20 bp, Artificial Sequence
  Synthetic: descartes_0103_AICDA
ctgctggaatacttttgtag

SEQ ID NO: 4191 - DNA, 20 bp, Artificial Sequence
  Synthetic: descartes_0104_AIF1
ggatggcagatctcttgccc

SEQ ID NO: 4192 - DNA, 20 bp, Artificial Sequence
  Synthetic: descartes_0105_AIF1
gagggcagatcctcatcact

SEQ ID NO: 4193 - DNA, 20 bp, Artificial Sequence
  Synthetic: descartes_0106_AIF1
cattaaggtcaaactccatg

SEQ ID NO: 4194 - DNA, 20 bp, Artificial Sequence
  Synthetic: descartes_0107_AIF1
accttaatggaaatggcgat

SEQ ID NO: 4195 - DNA, 20 bp, Artificial Sequence
  Synthetic: descartes_0108_AIF1
gctctaggtgagtcttgggg

SEQ ID NO: 4196 - DNA, 20 bp, Artificial Sequence
  Synthetic: descartes_0109_AIF1
ggactgctgaaggcccagca

SEQ ID NO: 4197 - DNA, 20 bp, Artificial Sequence
  Synthetic: descartes_0110_AIF1
tcaggatgatgctgggcaag

SEQ ID NO: 4198 - DNA, 20 bp, Artificial Sequence
  Synthetic: descartes_0111_AIF1
tccagcattcgtttcaggga

SEQ ID NO: 4199 - DNA, 20 bp, Artificial Sequence
  Synthetic: descartes_0112_AKAP1
gcttcaccacctgtcagggc

SEQ ID NO: 4200 - DNA, 20 bp, Artificial Sequence
  Synthetic: descartes_0113_AKAP1
accggaagcagatgccgcca

SEQ ID NO: 4201 - DNA, 20 bp, Artificial Sequence
  Synthetic: descartes_0114_AKAP1
agggagcagaagtccttctg

SEQ ID NO: 4202 - DNA, 20 bp, Artificial Sequence
  Synthetic: descartes_0115_AKAP1
cgagagaaaaaccaccacca

SEQ ID NO: 4203 - DNA, 20 bp, Artificial Sequence
  Synthetic: descartes_0116_AKAP1
tggtgaactgggacacagct

SEQ ID NO: 4204 - DNA, 20 bp, Artificial Sequence
  Synthetic: descartes_0117_AKAP1
ctggagaatagtacaccctt

SEQ ID NO: 4205 - DNA, 20 bp, Artificial Sequence
  Synthetic: descartes_0118_AKAP1
ccccaacacggcatcaccag

SEQ ID NO: 4206 - DNA, 20 bp, Artificial Sequence
  Synthetic: descartes_0119_AKAP1
gagggggaagaagataaggg

SEQ ID NO: 4207 - DNA, 20 bp, Artificial Sequence
  Synthetic: descartes_0120_AKT1
tgcagccaaccctccttcac

SEQ ID NO: 4208 - DNA, 20 bp, Artificial Sequence
  Synthetic: descartes_0121_AKT1
agctcatcctcatggaggag

SEQ ID NO: 4209 - DNA, 20 bp, Artificial Sequence
  Synthetic: descartes_0122_AKT1
atgaggagttcacggcccag

SEQ ID NO: 4210 - DNA, 20 bp, Artificial Sequence
  Synthetic: descartes_0123_AKT1
agtacctgaagctgctgggc

SEQ ID NO: 4211 - DNA, 20 bp, Artificial Sequence
  Synthetic: descartes_0124_AKT1
agggctgctcaagaaggacc

SEQ ID NO: 4212 - DNA, 20 bp, Artificial Sequence
  Synthetic: descartes_0125_AKT1
ggcaaggtgatcctggtgaa

SEQ ID NO: 4213 - DNA, 20 bp, Artificial Sequence
  Synthetic: descartes_0126_AKT1
cagacccacgaccgcctctg

SEQ ID NO: 4214 - DNA, 20 bp, Artificial Sequence
  Synthetic: descartes_0127_AKT1
ccggtatcgtgtggcagcac

SEQ ID NO: 4215 - DNA, 20 bp, Artificial Sequence
  Synthetic: descartes_0128_ALCAM
ctataatacctgccattaat

SEQ ID NO: 4216 - DNA, 20 bp, Artificial Sequence
  Synthetic: descartes_0129_ALCAM
gtggcagcacttgtattgtc

SEQ ID NO: 4217 - DNA, 20 bp, Artificial Sequence
  Synthetic: descartes_0130_ALCAM
ccctgaagagaatgttacat

SEQ ID NO: 4218 - DNA, 20 bp, Artificial Sequence
  Synthetic: descartes_0131_ALCAM
gatagtccactgggatcagt

SEQ ID NO: 4219 - DNA, 20 bp, Artificial Sequence
  Synthetic: descartes_0132_ALCAM
gctgctctgtttcgagaaac

SEQ ID NO: 4220 - DNA, 20 bp, Artificial Sequence
  Synthetic: descartes_0133_ALCAM
tgagaggttcaatctgtctt

SEQ ID NO: 4221 - DNA, 20 bp, Artificial Sequence
  Synthetic: descartes_0134_ALCAM
tggccagatggtccataata

SEQ ID NO: 4222 - DNA, 20 bp, Artificial Sequence
  Synthetic: descartes_0135_ALCAM
gcagacatagtttccagcat

SEQ ID NO: 4223 - DNA, 20 bp, Artificial Sequence
  Synthetic: descartes_0136_ALOX15
gccccagccatattcagaat

SEQ ID NO: 4224 - DNA, 20 bp, Artificial Sequence
  Synthetic: descartes_0137_ALOX15
tggaagacaagagagttgac

SEQ ID NO: 4225 - DNA, 20 bp, Artificial Sequence
  Synthetic: descartes_0138_ALOX15
ccagagccgcagcgcatctt

SEQ ID NO: 4226 - DNA, 20 bp, Artificial Sequence
  Synthetic: descartes_0139_ALOX15
agtgatctctcgacaccagg

SEQ ID NO: 4227 - DNA, 20 bp, Artificial Sequence
  Synthetic: descartes_0140_ALOX15
cttatccagggcagccagct

SEQ ID NO: 4228 - DNA, 20 bp, Artificial Sequence
  Synthetic: descartes_0141_ALOX15
tggtgtggtcagagcaagct

SEQ ID NO: 4229 - DNA, 20 bp, Artificial Sequence
  Synthetic: descartes_0142_ALOX15
agcatgactagaggggcagc

SEQ ID NO: 4230 - DNA, 20 bp, Artificial Sequence
  Synthetic: descartes_0143_ALOX15
gccagaagccaggccattgg

SEQ ID NO: 4231 - DNA, 20 bp, Artificial Sequence
  Synthetic: descartes_0144_ANXA1
gcatcaagaactaacaaaga

SEQ ID NO: 4232 - DNA, 20 bp, Artificial Sequence
  Synthetic: descartes_0145_ANXA1
gcagagctaaaacaacctcc

SEQ ID NO: 4233 - DNA, 20 bp, Artificial Sequence
  Synthetic: descartes_0146_ANXA1
agaacgggaaaccataatcc

SEQ ID NO: 4234 - DNA, 20 bp, Artificial Sequence
  Synthetic: descartes_0147_ANXA1
gctctgctaaaaactccagc

SEQ ID NO: 4235 - DNA, 20 bp, Artificial Sequence
  Synthetic: descartes_0148_ANXA1
agaaatacaccaagtacagt

SEQ ID NO: 4236 - DNA, 20 bp, Artificial Sequence
  Synthetic: descartes_0149_ANXA1
aataaaccaggcctgcttga

SEQ ID NO: 4237 - DNA, 20 bp, Artificial Sequence
  Synthetic: descartes_0150_ANXA1
ctggagatatgctgctttga

SEQ ID NO: 4238 - DNA, 20 bp, Artificial Sequence
  Synthetic: descartes_0151_ANXA1
gcttagttagaatgtcaatg

SEQ ID NO: 4239 - DNA, 20 bp, Artificial Sequence
  Synthetic: descartes_0152_APCS
catgatcagtaacagattct

SEQ ID NO: 4240 - DNA, 20 bp, Artificial Sequence
  Synthetic: descartes_0153_APCS
atgatgacatatcctctgat

SEQ ID NO: 4241 - DNA, 20 bp, Artificial Sequence
  Synthetic: descartes_0154_APCS
accaaaggtgtcccattgat

SEQ ID NO: 4242 - DNA, 20 bp, Artificial Sequence
  Synthetic: descartes_0155_APCS
tgggggcagcacagagtccc

SEQ ID NO: 4243 - DNA, 20 bp, Artificial Sequence
  Synthetic: descartes_0156_APCS
ataggagccagtcctttgtg

SEQ ID NO: 4244 - DNA, 20 bp, Artificial Sequence
  Synthetic: descartes_0157_APCS
ctagagaatctgttactgat

SEQ ID NO: 4245 - DNA, 20 bp, Artificial Sequence
  Synthetic: descartes_0158_APCS
gatgtaactttgtgtcttcc

SEQ ID NO: 4246 - DNA, 20 bp, Artificial Sequence
  Synthetic: descartes_0159_APCS
gagcctatagtgatctctct

SEQ ID NO: 4247 - DNA, 20 bp, Artificial Sequence
  Synthetic: descartes_0160_APLF
gatgaagataatgataatgt

SEQ ID NO: 4248 - DNA, 20 bp, Artificial Sequence
  Synthetic: descartes_0161_APLF
agaacagctcattgcctcat

SEQ ID NO: 4249 - DNA, 20 bp, Artificial Sequence
  Synthetic: descartes_0162_APLF
gccatcctggtgatagtgat

SEQ ID NO: 4250 - DNA, 20 bp, Artificial Sequence
  Synthetic: descartes_0163_APLF
ccccatacatgcaggatgtc

SEQ ID NO: 4251 - DNA, 20 bp, Artificial Sequence
  Synthetic: descartes_0164_APLF
ccagtcttcagagaagagtc

SEQ ID NO: 4252 - DNA, 20 bp, Artificial Sequence
  Synthetic: descartes_0165_APLF
gcttcaatggtaagagctga

SEQ ID NO: 4253 - DNA, 20 bp, Artificial Sequence
  Synthetic: descartes_0166_APLF
cctcatgagactactggtgc

SEQ ID NO: 4254 - DNA, 20 bp, Artificial Sequence
  Synthetic: descartes_0167_APLF
tctgtgcattagtcttaata

SEQ ID NO: 4255 - DNA, 20 bp, Artificial Sequence
  Synthetic: descartes_0168_ARG1
gagtgtgatgtgaaggatta

SEQ ID NO: 4256 - DNA, 20 bp, Artificial Sequence
  Synthetic: descartes_0169_ARG1
ccacagaccttggattcttc

SEQ ID NO: 4257 - DNA, 20 bp, Artificial Sequence
  Synthetic: descartes_0170_ARG1
aatgactgaagtggacagac

SEQ ID NO: 4258 - DNA, 20 bp, Artificial Sequence
  Synthetic: descartes_0171_ARG1
acaccagctactggcacacc

SEQ ID NO: 4259 - DNA, 20 bp, Artificial Sequence
  Synthetic: descartes_0172_ARG1
gttccttcaggaggaaagat

SEQ ID NO: 4260 - DNA, 20 bp, Artificial Sequence
  Synthetic: descartes_0173_ARG1
ttctgtgatgtagagacctt

SEQ ID NO: 4261 - DNA, 20 bp, Artificial Sequence
  Synthetic: descartes_0174_ARG1
atgttgacggactggaccca

SEQ ID NO: 4262 - DNA, 20 bp, Artificial Sequence
  Synthetic: descartes_0175_ARG1
ctgacatccctaatgacagt

SEQ ID NO: 4263 - DNA, 20 bp, Artificial Sequence
  Synthetic: descartes_0176_ARG2
ctccagtccccaaagatgat

SEQ ID NO: 4264 - DNA, 20 bp, Artificial Sequence
  Synthetic: descartes_0177_ARG2
tcctcagagaactacaggat

SEQ ID NO: 4265 - DNA, 20 bp, Artificial Sequence
  Synthetic: descartes_0178_ARG2
ctggatcaaaccttgtatct

SEQ ID NO: 4266 - DNA, 20 bp, Artificial Sequence
  Synthetic: descartes_0179_ARG2
catgagagatattgatcgac

SEQ ID NO: 4267 - DNA, 20 bp, Artificial Sequence
  Synthetic: descartes_0180_ARG2
atttctcctcagagaactac

SEQ ID NO: 4268 - DNA, 20 bp, Artificial Sequence
  Synthetic: descartes_0181_ARG2
accctacactggctccagcc

SEQ ID NO: 4269 - DNA, 20 bp, Artificial Sequence
  Synthetic: descartes_0182_ARG2
atcaagccagcttctcttat

SEQ ID NO: 4270 - DNA, 20 bp, Artificial Sequence
  Synthetic: descartes_0183_ARG2
gggactggagtaaaactcaa

SEQ ID NO: 4271 - DNA, 20 bp, Artificial Sequence
  Synthetic: descartes_0184_ARHGEF15
ggggaccccccacagccaga

SEQ ID NO: 4272 - DNA, 20 bp, Artificial Sequence
  Synthetic: descartes_0185_ARHGEF15
ggggcagccctggactccag

SEQ ID NO: 4273 - DNA, 20 bp, Artificial Sequence
  Synthetic: descartes_0186_ARHGEF15
gtgttcccctgtgacttcac

SEQ ID NO: 4274 - DNA, 20 bp, Artificial Sequence
  Synthetic: descartes_0187_ARHGEF15
ctggagaaggactcccatcc

SEQ ID NO: 4275 - DNA, 20 bp, Artificial Sequence
  Synthetic: descartes_0188_ARHGEF15
gattccatcttcagaaagca

SEQ ID NO: 4276 - DNA, 20 bp, Artificial Sequence
  Synthetic: descartes_0189_ARHGEF15
ggtgagccggatcagctctt

SEQ ID NO: 4277 - DNA, 20 bp, Artificial Sequence
  Synthetic: descartes_0190_ARHGEF15
gcgacctgctgctcatcact

SEQ ID NO: 4278 - DNA, 20 bp, Artificial Sequence
  Synthetic: descartes_0191_ARHGEF15
gaggtggtgacgtccgaggc

SEQ ID NO: 4279 - DNA, 20 bp, Artificial Sequence
  Synthetic: descartes_0192_ARID4A
attccctcagatccaataca

SEQ ID NO: 4280 - DNA, 20 bp, Artificial Sequence
  Synthetic: descartes_0193_ARID4A
gaatcaataaatgatcgaac

SEQ ID NO: 4281 - DNA, 20 bp, Artificial Sequence
  Synthetic: descartes_0194_ARID4A
cattgtaggaagcagctgaa

SEQ ID NO: 4282 - DNA, 20 bp, Artificial Sequence
  Synthetic: descartes_0195_ARID4A
gtggagagctcagattccgg

SEQ ID NO: 4283 - DNA, 20 bp, Artificial Sequence
  Synthetic: descartes_0196_ARID4A
atagtcatcatctacatcct

SEQ ID NO: 4284 - DNA, 20 bp, Artificial Sequence
  Synthetic: descartes_0197_ARID4A
gctgcagcacttgttcgctt

SEQ ID NO: 4285 - DNA, 20 bp, Artificial Sequence
  Synthetic: descartes_0198_ARID4A
tatggaccttggcattccta

SEQ ID NO: 4286 - DNA, 20 bp, Artificial Sequence
  Synthetic: descartes_0199_ARID4A
acttctgcctctcctcatct

SEQ ID NO: 4287 - DNA, 20 bp, Artificial Sequence
  Synthetic: descartes_0200_ARID4B
gtaatatccaaaccagtgtc

SEQ ID NO: 4288 - DNA, 20 bp, Artificial Sequence
  Synthetic: descartes_0201_ARID4B
gatatccaagtacaggtcgt

SEQ ID NO: 4289 - DNA, 20 bp, Artificial Sequence
  Synthetic: descartes_0202_ARID4B
ctatcatcctcatcttcatc

SEQ ID NO: 4290 - DNA, 20 bp, Artificial Sequence
  Synthetic: descartes_0203_ARID4B
cctcgtccataccgcacttg

SEQ ID NO: 4291 - DNA, 20 bp, Artificial Sequence
  Synthetic: descartes_0204_ARID4B
gaggaaaaaagaaaatctct

SEQ ID NO: 4292 - DNA, 20 bp, Artificial Sequence
  Synthetic: descartes_0205_ARID4B
ctgatcagaatgtgtaggta

SEQ ID NO: 4293 - DNA, 20 bp, Artificial Sequence
  Synthetic: descartes_0206_ARID4B
aggagtactgtagatcagcc

SEQ ID NO: 4294 - DNA, 20 bp, Artificial Sequence
  Synthetic: descartes_0207_ARID4B
aaaggaggaacagaacagtt

SEQ ID NO: 4295 - DNA, 20 bp, Artificial Sequence
  Synthetic: descartes_0208_ART3
gctgaatatgccaaggtaaa

SEQ ID NO: 4296 - DNA, 20 bp, Artificial Sequence
  Synthetic: descartes_0209_ART3
aggataaccatggaatagcc

SEQ ID NO: 4297 - DNA, 20 bp, Artificial Sequence
  Synthetic: descartes_0210_ART3
ccttggcatattcagccaaa

SEQ ID NO: 4298 - DNA, 20 bp, Artificial Sequence
  Synthetic: descartes_0211_ART3
ccacacagtatctaattgct

SEQ ID NO: 4299 - DNA, 20 bp, Artificial Sequence
  Synthetic: descartes_0212_ART3
gccctccaaatgtaaatgaa

SEQ ID NO: 4300 - DNA, 20 bp, Artificial Sequence
  Synthetic: descartes_0213_ART3
aacccatctatgtctacaac

SEQ ID NO: 4301 - DNA, 20 bp, Artificial Sequence
  Synthetic: descartes_0214_ART3
cctcacaagagccctgcagt

SEQ ID NO: 4302 - DNA, 20 bp, Artificial Sequence
  Synthetic: descartes_0215_ART3
cccgaggatgcagaaggatg

SEQ ID NO: 4303 - DNA, 20 bp, Artificial Sequence
  Synthetic: descartes_0216_ASH1L
ggaccaagaatacatgatgc

SEQ ID NO: 4304 - DNA, 20 bp, Artificial Sequence
  Synthetic: descartes_0217_ASH1L
gtgaagtgtcctgtgcagaa

SEQ ID NO: 4305 - DNA, 20 bp, Artificial Sequence
  Synthetic: descartes_0218_ASH1L
actgatgcacagcaacagtt

SEQ ID NO: 4306 - DNA, 20 bp, Artificial Sequence
  Synthetic: descartes_0219_ASH1L
gcggtagatacatcagaagc

SEQ ID NO: 4307 - DNA, 20 bp, Artificial Sequence
  Synthetic: descartes_0220_ASH1L
actatcagctaagagagcaa

SEQ ID NO: 4308 - DNA, 20 bp, Artificial Sequence
  Synthetic: descartes_0221_ASH1L
atgtagctcactatcaaata

SEQ ID NO: 4309 - DNA, 20 bp, Artificial Sequence
  Synthetic: descartes_0222_ASH1L
aagtccggagaagtgcaata

SEQ ID NO: 4310 - DNA, 20 bp, Artificial Sequence
  Synthetic: descartes_0223_ASH1L
actgggttcctcagagagat

SEQ ID NO: 4311 - DNA, 20 bp, Artificial Sequence
  Synthetic: descartes_0224_ASXL1
ccttaagaggaccccccaca

SEQ ID NO: 4312 - DNA, 20 bp, Artificial Sequence
  Synthetic: descartes_0225_ASXL1
actccctccatccagtgaca

SEQ ID NO: 4313 - DNA, 20 bp, Artificial Sequence
  Synthetic: descartes_0226_ASXL1
ctgaggcaggctaggaattc

SEQ ID NO: 4314 - DNA, 20 bp, Artificial Sequence
  Synthetic: descartes_0227_ASXL1
cagaagggcaagtccatgac

SEQ ID NO: 4315 - DNA, 20 bp, Artificial Sequence
  Synthetic: descartes_0228_ASXL1
ccaggaagtggtgccagact

SEQ ID NO: 4316 - DNA, 20 bp, Artificial Sequence
  Synthetic: descartes_0229_ASXL1
ccttcagaggagtcaggaca

SEQ ID NO: 4317 - DNA, 20 bp, Artificial Sequence
  Synthetic: descartes_0230_ASXL1
aatgtccacctgttgacagt

SEQ ID NO: 4318 - DNA, 20 bp, Artificial Sequence
  Synthetic: descartes_0231_ASXL1
gtgcgagccacagtgcatca

SEQ ID NO: 4319 - DNA, 20 bp, Artificial Sequence
  Synthetic: descartes_0232_ASXL3
ctatgaccagaatgaaatga

SEQ ID NO: 4320 - DNA, 20 bp, Artificial Sequence
  Synthetic: descartes_0233_ASXL3
agtgctagatacctcagaac

SEQ ID NO: 4321 - DNA, 20 bp, Artificial Sequence
  Synthetic: descartes_0234_ASXL3
tgaggaggctgaaagtctaa

SEQ ID NO: 4322 - DNA, 20 bp, Artificial Sequence
  Synthetic: descartes_0235_ASXL3
cttgaacccgagtgagtaac

SEQ ID NO: 4323 - DNA, 20 bp, Artificial Sequence
  Synthetic: descartes_0236_ASXL3
acaggaagagcaacatttgt

SEQ ID NO: 4324 - DNA, 20 bp, Artificial Sequence
  Synthetic: descartes_0237_ASXL3
agaaggctctagaaataaaa

SEQ ID NO: 4325 - DNA, 20 bp, Artificial Sequence
  Synthetic: descartes_0238_ASXL3
ctggaaacatgctgacaata

SEQ ID NO: 4326 - DNA, 20 bp, Artificial Sequence
  Synthetic: descartes_0239_ASXL3
agaagaggtagatgaaacaa

SEQ ID NO: 4327 - DNA, 20 bp, Artificial Sequence
  Synthetic: descartes_0240_ATAD2
gaggtagctatgcaaaagat

SEQ ID NO: 4328 - DNA, 20 bp, Artificial Sequence
  Synthetic: descartes_0241_ATAD2
gagttagtactacatcccct

SEQ ID NO: 4329 - DNA, 20 bp, Artificial Sequence
  Synthetic: descartes_0242_ATAD2
ctgtatatacattagacatt

SEQ ID NO: 4330 - DNA, 20 bp, Artificial Sequence
  Synthetic: descartes_0243_ATAD2
gaggtactcccagtagcacc

SEQ ID NO: 4331 - DNA, 20 bp, Artificial Sequence
  Synthetic: descartes_0244_ATAD2
gaagccctgcagagagtatt

SEQ ID NO: 4332 - DNA, 20 bp, Artificial Sequence
  Synthetic: descartes_0245_ATAD2
ccctctgctgtccaatccat

SEQ ID NO: 4333 - DNA, 20 bp, Artificial Sequence
  Synthetic: descartes_0246_ATAD2
atgtccagttaccggataaa

SEQ ID NO: 4334 - DNA, 20 bp, Artificial Sequence
  Synthetic: descartes_0247_ATAD2
gaagagctagcagaaaactg

SEQ ID NO: 4335 - DNA, 20 bp, Artificial Sequence
  Synthetic: descartes_0248_ATAD2B
gctggaggagatacgtggct

SEQ ID NO: 4336 - DNA, 20 bp, Artificial Sequence
  Synthetic: descartes_0249_ATAD2B
agaggtagacaataaaaata

SEQ ID NO: 4337 - DNA, 20 bp, Artificial Sequence
  Synthetic: descartes_0250_ATAD2B
gaggatagtgaagatgaaaa

SEQ ID NO: 4338 - DNA, 20 bp, Artificial Sequence
  Synthetic: descartes_0251_ATAD2B
actgacagcttcccaccaat

SEQ ID NO: 4339 - DNA, 20 bp, Artificial Sequence
  Synthetic: descartes_0252_ATAD2B
cctgtgccaggagggccata

SEQ ID NO: 4340 - DNA, 20 bp, Artificial Sequence
  Synthetic: descartes_0253_ATAD2B
ctgtcctccgtatggttctc

SEQ ID NO: 4341 - DNA, 20 bp, Artificial Sequence
  Synthetic: descartes_0254_ATAD2B
agtgatagccacgtatctcc

SEQ ID NO: 4342 - DNA, 20 bp, Artificial Sequence
  Synthetic: descartes_0255_ATAD2B
gtgaagctcgaagaacagta

SEQ ID NO: 4343 - DNA, 20 bp, Artificial Sequence
  Synthetic: descartes_0256_ATAD5
cctggaatagccccagtatc

SEQ ID NO: 4344 - DNA, 20 bp, Artificial Sequence
  Synthetic: descartes_0257_ATAD5
agtggaagcctttagttgac

SEQ ID NO: 4345 - DNA, 20 bp, Artificial Sequence
  Synthetic: descartes_0258_ATAD5
ccttactcctaaaaaaacaa

SEQ ID NO: 4346 - DNA, 20 bp, Artificial Sequence
  Synthetic: descartes_0259_ATAD5
aagtatctcccaaacctaaa

SEQ ID NO: 4347 - DNA, 20 bp, Artificial Sequence
  Synthetic: descartes_0260_ATAD5
ccctaaaaatactaaaaaga

SEQ ID NO: 4348 - DNA, 20 bp, Artificial Sequence
  Synthetic: descartes_0261_ATAD5
gtggagcaaaaaccctgtct

SEQ ID NO: 4349 - DNA, 20 bp, Artificial Sequence
  Synthetic: descartes_0262_ATAD5
ggagtactaattctggtgaa

SEQ ID NO: 4350 - DNA, 20 bp, Artificial Sequence
  Synthetic: descartes_0263_ATAD5
ctagcacatcattcaaacac

SEQ ID NO: 4351 - DNA, 20 bp, Artificial Sequence
  Synthetic: descartes_0264_ATAT1
gaatgaacctggcgttgagt

SEQ ID NO: 4352 - DNA, 20 bp, Artificial Sequence
  Synthetic: descartes_0265_ATAT1
catccatgagtctgtgcaac

SEQ ID NO: 4353 - DNA, 20 bp, Artificial Sequence
  Synthetic: descartes_0266_ATAT1
atcaaagttggatacaagaa

SEQ ID NO: 4354 - DNA, 20 bp, Artificial Sequence
  Synthetic: descartes_0267_ATAT1
ggggccaaggaggctccaca

SEQ ID NO: 4355 - DNA, 20 bp, Artificial Sequence
  Synthetic: descartes_0268_ATAT1
ctgttctccctgcttggagt

SEQ ID NO: 4356 - DNA, 20 bp, Artificial Sequence
  Synthetic: descartes_0269_ATAT1
aaggtggcacactccctcct

SEQ ID NO: 4357 - DNA, 20 bp, Artificial Sequence
  Synthetic: descartes_0270_ATAT1
atgaaaccaataatggctcc

SEQ ID NO: 4358 - DNA, 20 bp, Artificial Sequence
  Synthetic: descartes_0271_ATAT1
cgctcctatcactagtgcat

SEQ ID NO: 4359 - DNA, 20 bp, Artificial Sequence
  Synthetic: descartes_0272_ATF1
tgtgaggagcctatgctgtc

SEQ ID NO: 4360 - DNA, 20 bp, Artificial Sequence
  Synthetic: descartes_0273_ATF1
tgccccgtgtatcttcagaa

SEQ ID NO: 4361 - DNA, 20 bp, Artificial Sequence
  Synthetic: descartes_0274_ATF1
aattgggggtcatctgtctt

SEQ ID NO: 4362 - DNA, 20 bp, Artificial Sequence
  Synthetic: descartes_0275_ATF1
ttggaataaagatccttcaa

SEQ ID NO: 4363 - DNA, 20 bp, Artificial Sequence
  Synthetic: descartes_0276_ATF1
aaagacttatcttctgaaga

SEQ ID NO: 4364 - DNA, 20 bp, Artificial Sequence
  Synthetic: descartes_0277_ATF1
tgctgctgtcacttctatgt

SEQ ID NO: 4365 - DNA, 20 bp, Artificial Sequence
  Synthetic: descartes_0278_ATF1
tcagaaagtgaggagtccca

SEQ ID NO: 4366 - DNA, 20 bp, Artificial Sequence
  Synthetic: descartes_0279_ATF1
caggactgcaactcggtttt

SEQ ID NO: 4367 - DNA, 20 bp, Artificial Sequence
  Synthetic: descartes_0280_B2M
agtgggggtgaattcagtgt

SEQ ID NO: 4368 - DNA, 20 bp, Artificial Sequence
  Synthetic: descartes_0281_B2M
atccatccgacattgaagtt

SEQ ID NO: 4369 - DNA, 20 bp, Artificial Sequence
  Synthetic: descartes_0282_B2M
ctcacgtcatccagcagaga

SEQ ID NO: 4370 - DNA, 20 bp, Artificial Sequence
  Synthetic: descartes_0283_B2M
aattctctctccattcttca

SEQ ID NO: 4371 - DNA, 20 bp, Artificial Sequence
  Synthetic: descartes_0284_B2M
actttccattctctgctgga

SEQ ID NO: 4372 - DNA, 20 bp, Artificial Sequence
  Synthetic: descartes_0285_B2M
ctgaattgctatgtgtctgg

SEQ ID NO: 4373 - DNA, 20 bp, Artificial Sequence
  Synthetic: descartes_0286_B2M
cattctctgctggatgacgt

SEQ ID NO: 4374 - DNA, 20 bp, Artificial Sequence
  Synthetic: descartes_0287_B2M
agcaaggactggtctttcta

SEQ ID NO: 4375 - DNA, 20 bp, Artificial Sequence
  Synthetic: descartes_0288_BAX
cgagtggcagctgacatgtt

SEQ ID NO: 4376 - DNA, 20 bp, Artificial Sequence
  Synthetic: descartes_0289_BAX
ggacgcccacgtggcagacc

SEQ ID NO: 4377 - DNA, 20 bp, Artificial Sequence
  Synthetic: descartes_0290_BAX
ctggcaaagtagaaaagggc

SEQ ID NO: 4378 - DNA, 20 bp, Artificial Sequence
  Synthetic: descartes_0291_BAX
atccaggatcgagcagggcg

SEQ ID NO: 4379 - DNA, 20 bp, Artificial Sequence
  Synthetic: descartes_0292_BAX
tgacggcaacttcaactggg

SEQ ID NO: 4380 - DNA, 20 bp, Artificial Sequence
  Synthetic: descartes_0293_BAX
tactttgccagcaaactggt

SEQ ID NO: 4381 - DNA, 20 bp, Artificial Sequence
  Synthetic: descartes_0294_BAX
tggcgggagtgctcaccgcc

SEQ ID NO: 4382 - DNA, 20 bp, Artificial Sequence
  Synthetic: descartes_0295_BAZ1A
gtggatacctgaggatcttg

SEQ ID NO: 4383 - DNA, 20 bp, Artificial Sequence
  Synthetic: descartes_0296_BAZ1A
gatgaagatgcagaccccac

SEQ ID NO: 4384 - DNA, 20 bp, Artificial Sequence
  Synthetic: descartes_0297_BAZ1A
ctacaagagcttcctctaat

SEQ ID NO: 4385 - DNA, 20 bp, Artificial Sequence
  Synthetic: descartes_0298_BAZ1A
gaagtcctccctccatcaca

SEQ ID NO: 4386 - DNA, 20 bp, Artificial Sequence
  Synthetic: descartes_0299_BAZ1A
ggaggtctccctcttcgtct

SEQ ID NO: 4387 - DNA, 20 bp, Artificial Sequence
  Synthetic: descartes_0300_BAZ1A
ccttctattcctggactctt

SEQ ID NO: 4388 - DNA, 20 bp, Artificial Sequence
  Synthetic: descartes_0301_BAZ1A
acaatagcagactcatgtaa

SEQ ID NO: 4389 - DNA, 20 bp, Artificial Sequence
  Synthetic: descartes_0302_BAZ1A
ggtgtgctctgctgactcct

SEQ ID NO: 4390 - DNA, 20 bp, Artificial Sequence
  Synthetic: descartes_0303_BAZ1B
ctgataggcttgctgaagat

SEQ ID NO: 4391 - DNA, 20 bp, Artificial Sequence
  Synthetic: descartes_0304_BAZ1B
gtggtgaactaagagaagag

SEQ ID NO: 4392 - DNA, 20 bp, Artificial Sequence
  Synthetic: descartes_0305_BAZ1B
ccagatgctcagtatcctat

SEQ ID NO: 4393 - DNA, 20 bp, Artificial Sequence
  Synthetic: descartes_0306_BAZ1B
tgcggacatatcccacttga

SEQ ID NO: 4394 - DNA, 20 bp, Artificial Sequence
  Synthetic: descartes_0307_BAZ1B
gtgggcgctctgtacgaatc

SEQ ID NO: 4395 - DNA, 20 bp, Artificial Sequence
  Synthetic: descartes_0308_BAZ1B
ggtgtggttgtctctacagc

SEQ ID NO: 4396 - DNA, 20 bp, Artificial Sequence
  Synthetic: descartes_0309_BAZ1B
ctagaggtcctaggtgtacc

SEQ ID NO: 4397 - DNA, 20 bp, Artificial Sequence
  Synthetic: descartes_0310_BAZ1B
cctaacccattctcaacttt

SEQ ID NO: 4398 - DNA, 20 bp, Artificial Sequence
  Synthetic: descartes_0311_BAZ2A
acctccccacagacttctcc

SEQ ID NO: 4399 - DNA, 20 bp, Artificial Sequence
  Synthetic: descartes_0312_BAZ2A
tgaggaccaacccactccct

SEQ ID NO: 4400 - DNA, 20 bp, Artificial Sequence
  Synthetic: descartes_0313_BAZ2A
ctgtagctggacatactctc

SEQ ID NO: 4401 - DNA, 20 bp, Artificial Sequence
  Synthetic: descartes_0314_BAZ2A
gatgatccttcacatcttcc

SEQ ID NO: 4402 - DNA, 20 bp, Artificial Sequence
  Synthetic: descartes_0315_BAZ2A
actatcatctgccaggagac

SEQ ID NO: 4403 - DNA, 20 bp, Artificial Sequence
  Synthetic: descartes_0316_BAZ2A
cctgataaaactcctcccag

SEQ ID NO: 4404 - DNA, 20 bp, Artificial Sequence
  Synthetic: descartes_0317_BAZ2A
aatggggatgtgaatgttaa

SEQ ID NO: 4405 - DNA, 20 bp, Artificial Sequence
  Synthetic: descartes_0318_BAZ2A
gggatgtcactgaagccgtc

SEQ ID NO: 4406 - DNA, 20 bp, Artificial Sequence
  Synthetic: descartes_0319_BAZ2B
aactgtccccagaagtctca

SEQ ID NO: 4407 - DNA, 20 bp, Artificial Sequence
  Synthetic: descartes_0320_BAZ2B
gtaagaactgcaccaccatg

SEQ ID NO: 4408 - DNA, 20 bp, Artificial Sequence
  Synthetic: descartes_0321_BAZ2B
ggtctgaaataccatgtaat

SEQ ID NO: 4409 - DNA, 20 bp, Artificial Sequence
  Synthetic: descartes_0322_BAZ2B
acaggagatactgaagatga

SEQ ID NO: 4410 - DNA, 20 bp, Artificial Sequence
  Synthetic: descartes_0323_BAZ2B
gggacacttggtacacccac

SEQ ID NO: 4411 - DNA, 20 bp, Artificial Sequence
  Synthetic: descartes_0324_BAZ2B
gtagtaagtgctagaggagc

SEQ ID NO: 4412 - DNA, 20 bp, Artificial Sequence
  Synthetic: descartes_0325_BAZ2B
ccttctaccacccatttatc

SEQ ID NO: 4413 - DNA, 20 bp, Artificial Sequence
  Synthetic: descartes_0326_BAZ2B
gaagtagctaagatgcctcc

SEQ ID NO: 4414 - DNA, 20 bp, Artificial Sequence
  Synthetic: descartes_0327_BCAN
ggtcttcagcataacagtac

SEQ ID NO: 4415 - DNA, 20 bp, Artificial Sequence
  Synthetic: descartes_0328_BCAN
gcagatgttctggaaggaga

SEQ ID NO: 4416 - DNA, 20 bp, Artificial Sequence
  Synthetic: descartes_0329_BCAN
tcttcttcctccaatgcctt

SEQ ID NO: 4417 - DNA, 20 bp, Artificial Sequence
  Synthetic: descartes_0330_BCAN
ttccccctgcagctctgggt

SEQ ID NO: 4418 - DNA, 20 bp, Artificial Sequence
  Synthetic: descartes_0331_BCAN
accttgacctccacagcgtc

SEQ ID NO: 4419 - DNA, 20 bp, Artificial Sequence
  Synthetic: descartes_0332_BCAN
tggggcccaggaggcctgtg

SEQ ID NO: 4420 - DNA, 20 bp, Artificial Sequence
  Synthetic: descartes_0333_BCAN
tctaccgagagggctctgcc

SEQ ID NO: 4421 - DNA, 20 bp, Artificial Sequence
  Synthetic: descartes_0334_BCAN
aaacacaatccatggtaccg

SEQ ID NO: 4422 - DNA, 20 bp, Artificial Sequence
  Synthetic: descartes_0335_BCAR1
ccagcccggccacagacctg

SEQ ID NO: 4423 - DNA, 20 bp, Artificial Sequence
  Synthetic: descartes_0336_BCAR1
caggagagcagaacagaaga

SEQ ID NO: 4424 - DNA, 20 bp, Artificial Sequence
  Synthetic: descartes_0337_BCAR1
ccaggtgccaccttctgccg

SEQ ID NO: 4425 - DNA, 20 bp, Artificial Sequence
  Synthetic: descartes_0338_BCAR1
agaagacccagaaggagctg

SEQ ID NO: 4426 - DNA, 20 bp, Artificial Sequence
  Synthetic: descartes_0339_BCAR1
cccgcagcgcggtgggcaat

SEQ ID NO: 4427 - DNA, 20 bp, Artificial Sequence
  Synthetic: descartes_0340_BCAR1
acccggcccgcaccccactg

SEQ ID NO: 4428 - DNA, 20 bp, Artificial Sequence
  Synthetic: descartes_0341_BCAR1
ccgggggcttcgtgccctcc

SEQ ID NO: 4429 - DNA, 20 bp, Artificial Sequence
  Synthetic: descartes_0342_BCAR1
cagcagctccttctgggtct

SEQ ID NO: 4430 - DNA, 20 bp, Artificial Sequence
  Synthetic: descartes_0343_BCL10
ctgtaagtagtctaacaatt

SEQ ID NO: 4431 - DNA, 20 bp, Artificial Sequence
  Synthetic: descartes_0344_BCL10
cgtgtatacctgtgtgagaa

SEQ ID NO: 4432 - DNA, 20 bp, Artificial Sequence
  Synthetic: descartes_0345_BCL10
agagaaattactctcatctg

SEQ ID NO: 4433 - DNA, 20 bp, Artificial Sequence
  Synthetic: descartes_0346_BCL10
ccaccagatctacagttaga

SEQ ID NO: 4434 - DNA, 20 bp, Artificial Sequence
  Synthetic: descartes_0347_BCL10
agttctgcctacttctagaa

SEQ ID NO: 4435 - DNA, 20 bp, Artificial Sequence
  Synthetic: descartes_0348_BCL10
cagatggagccacgaacaac

SEQ ID NO: 4436 - DNA, 20 bp, Artificial Sequence
  Synthetic: descartes_0349_BCL10
ttgtcgaacatcaagtagaa

SEQ ID NO: 4437 - DNA, 20 bp, Artificial Sequence
  Synthetic: descartes_0350_BCL10
tctgaaaaactgagggcatc

SEQ ID NO: 4438 - DNA, 20 bp, Artificial Sequence
  Synthetic: descartes_0351_BCL2
tcctggctgtctctgaagac

SEQ ID NO: 4439 - DNA, 20 bp, Artificial Sequence
  Synthetic: descartes_0352_BCL2
gccctggtgggagcttgcat

SEQ ID NO: 4440 - DNA, 20 bp, Artificial Sequence
  Synthetic: descartes_0353_BCL2
ccacggtggtggaggagctc

SEQ ID NO: 4441 - DNA, 20 bp, Artificial Sequence
  Synthetic: descartes_0354_BCL2
atttctcctggctgtctctg

SEQ ID NO: 4442 - DNA, 20 bp, Artificial Sequence
  Synthetic: descartes_0355_BCL2
tggaactgtacggccccagc

SEQ ID NO: 4443 - DNA, 20 bp, Artificial Sequence
  Synthetic: descartes_0356_BCL2
agttcggtggggtcatgtgt

SEQ ID NO: 4444 - DNA, 20 bp, Artificial Sequence
  Synthetic: descartes_0357_BCL3
ctctggtgaacctgcctaca

SEQ ID NO: 4445 - DNA, 20 bp, Artificial Sequence
  Synthetic: descartes_0358_BCL3
ttccttccttccccatctcc

SEQ ID NO: 4446 - DNA, 20 bp, Artificial Sequence
  Synthetic: descartes_0359_BCL3
ttggcactcggtgttcactg

SEQ ID NO: 4447 - DNA, 20 bp, Artificial Sequence
  Synthetic: descartes_0360_BCL3
tgctgacatcgccatggcca

SEQ ID NO: 4448 - DNA, 20 bp, Artificial Sequence
  Synthetic: descartes_0361_BCL3
ctggggtcctccgaggccct

SEQ ID NO: 4449 - DNA, 20 bp, Artificial Sequence
  Synthetic: descartes_0362_BCL3
cacggcgtggatgagcgggg

SEQ ID NO: 4450 - DNA, 20 bp, Artificial Sequence
  Synthetic: descartes_0363_BCL3
taccccactcgggccatggg

SEQ ID NO: 4451 - DNA, 20 bp, Artificial Sequence
  Synthetic: descartes_0364_BCL6
gagcccataaaacggtcctc

SEQ ID NO: 4452 - DNA, 20 bp, Artificial Sequence
  Synthetic: descartes_0365_BCL6
acagggatagggcttctcac

SEQ ID NO: 4453 - DNA, 20 bp, Artificial Sequence
  Synthetic: descartes_0366_BCL6
gagccccccaatgcacccct

SEQ ID NO: 4454 - DNA, 20 bp, Artificial Sequence
  Synthetic: descartes_0367_BCL6
aactggtctgtaaagatgct

SEQ ID NO: 4455 - DNA, 20 bp, Artificial Sequence
  Synthetic: descartes_0368_BCL6
tgggggctctgtggactaac

SEQ ID NO: 4456 - DNA, 20 bp, Artificial Sequence
  Synthetic: descartes_0369_BCL6
cccacgagcctacacggccc

SEQ ID NO: 4457 - DNA, 20 bp, Artificial Sequence
  Synthetic: descartes_0370_BCL6
cttgggtgaatagatattgc

SEQ ID NO: 4458 - DNA, 20 bp, Artificial Sequence
  Synthetic: descartes_0371_BCL6
aggccctcagccacactgta

SEQ ID NO: 4459 - DNA, 20 bp, Artificial Sequence
  Synthetic: descartes_0372_BCLAF3
ctgccaacagcaaccaaatc

SEQ ID NO: 4460 - DNA, 20 bp, Artificial Sequence
  Synthetic: descartes_0373_BCLAF3
ggtggtttccctcaacctca

SEQ ID NO: 4461 - DNA, 20 bp, Artificial Sequence
  Synthetic: descartes_0374_BCLAF3
cctcaacctcaaatggtttg

SEQ ID NO: 4462 - DNA, 20 bp, Artificial Sequence
  Synthetic: descartes_0375_BCLAF3
tatgtataagcctcacagag

SEQ ID NO: 4463 - DNA, 20 bp, Artificial Sequence
  Synthetic: descartes_0376_BCLAF3
tgatgggagaactcagaagt

SEQ ID NO: 4464 - DNA, 20 bp, Artificial Sequence
  Synthetic: descartes_0377_BCLAF3
gaggtggcagatgccagccc

SEQ ID NO: 4465 - DNA, 20 bp, Artificial Sequence
  Synthetic: descartes_0378_BCLAF3
agaaaatatggacacacatc

SEQ ID NO: 4466 - DNA, 20 bp, Artificial Sequence
  Synthetic: descartes_0379_BCLAF3
actgtaagtgatttcttcct

SEQ ID NO: 4467 - DNA, 20 bp, Artificial Sequence
  Synthetic: descartes_0380_BLM
gggagagatgcatgaatcac

SEQ ID NO: 4468 - DNA, 20 bp, Artificial Sequence
  Synthetic: descartes_0381_BLM
gatgaagacttatatatcaa

SEQ ID NO: 4469 - DNA, 20 bp, Artificial Sequence
  Synthetic: descartes_0382_BLM
gcatgagctttaacagacat

SEQ ID NO: 4470 - DNA, 20 bp, Artificial Sequence
  Synthetic: descartes_0383_BLM
acagtaatgtaccatgctat

SEQ ID NO: 4471 - DNA, 20 bp, Artificial Sequence
  Synthetic: descartes_0384_BLM
aagaggaagaagaagcagaa

SEQ ID NO: 4472 - DNA, 20 bp, Artificial Sequence
  Synthetic: descartes_0385_BLM
actgaggaacagaaggatga

SEQ ID NO: 4473 - DNA, 20 bp, Artificial Sequence
  Synthetic: descartes_0386_BLM
gcatccagaaatctgaaaca

SEQ ID NO: 4474 - DNA, 20 bp, Artificial Sequence
  Synthetic: descartes_0387_BLM
gcagccagcaaatcttccac

SEQ ID NO: 4475 - DNA, 20 bp, Artificial Sequence
  Synthetic: descartes_0388_BMP4
agtaccaccttatcatactc

SEQ ID NO: 4476 - DNA, 20 bp, Artificial Sequence
  Synthetic: descartes_0389_BMP4
actggtccctgggatgttct

SEQ ID NO: 4477 - DNA, 20 bp, Artificial Sequence
  Synthetic: descartes_0390_BMP4
acctcagcagcatccctgag

SEQ ID NO: 4478 - DNA, 20 bp, Artificial Sequence
  Synthetic: descartes_0391_BMP4
atgtgagccctgcggtcctt

SEQ ID NO: 4479 - DNA, 20 bp, Artificial Sequence
  Synthetic: descartes_0392_BMP4
atacctgagacggggaagaa

SEQ ID NO: 4480 - DNA, 20 bp, Artificial Sequence
  Synthetic: descartes_0393_BMP4
ccaccgtgtcacattgtggt

SEQ ID NO: 4481 - DNA, 20 bp, Artificial Sequence
  Synthetic: descartes_0394_BMP4
gggatactggaattgacaga

SEQ ID NO: 4482 - DNA, 20 bp, Artificial Sequence
  Synthetic: descartes_0395_BMP4
gtttcctctttaacctcagc

SEQ ID NO: 4483 - DNA, 20 bp, Artificial Sequence
  Synthetic: descartes_0396_BMX
gctgggagccatagattttc

SEQ ID NO: 4484 - DNA, 20 bp, Artificial Sequence
  Synthetic: descartes_0397_BMX
ctggtaacatctccagatca

SEQ ID NO: 4485 - DNA, 20 bp, Artificial Sequence
  Synthetic: descartes_0398_BMX
gttactgcttgcaacatctt

SEQ ID NO: 4486 - DNA, 20 bp, Artificial Sequence
  Synthetic: descartes_0399_BMX
cagtcaagtggtcagctcca

SEQ ID NO: 4487 - DNA, 20 bp, Artificial Sequence
  Synthetic: descartes_0400_BMX
cgtgactcctcaggtaattc

SEQ ID NO: 4488 - DNA, 20 bp, Artificial Sequence
  Synthetic: descartes_0401_BMX
attacttcaaatacagcagc

SEQ ID NO: 4489 - DNA, 20 bp, Artificial Sequence
  Synthetic: descartes_0402_BMX
ccagggacacagagtcgggg

SEQ ID NO: 4490 - DNA, 20 bp, Artificial Sequence
  Synthetic: descartes_0403_BMX
acacagagatctctgtccac

SEQ ID NO: 4491 - DNA, 20 bp, Artificial Sequence
  Synthetic: descartes_0404_BPTF
cagtggactcaccagaaacc

SEQ ID NO: 4492 - DNA, 20 bp, Artificial Sequence
  Synthetic: descartes_0405_BPTF
actgcacactccaaaatggc

SEQ ID NO: 4493 - DNA, 20 bp, Artificial Sequence
  Synthetic: descartes_0406_BPTF
atctaaggactagttacaaa

SEQ ID NO: 4494 - DNA, 20 bp, Artificial Sequence
  Synthetic: descartes_0407_BPTF
ggaacaaacctataaacatg

SEQ ID NO: 4495 - DNA, 20 bp, Artificial Sequence
  Synthetic: descartes_0408_BPTF
atggtgcctaatgagcatat

SEQ ID NO: 4496 - DNA, 20 bp, Artificial Sequence
  Synthetic: descartes_0409_BPTF
gagtgtgcagttaaaccagt

SEQ ID NO: 4497 - DNA, 20 bp, Artificial Sequence
  Synthetic: descartes_0410_BPTF
gataagatagataaagaaga

SEQ ID NO: 4498 - DNA, 20 bp, Artificial Sequence
  Synthetic: descartes_0411_BPTF
tgacaaaccctacaatggtc

SEQ ID NO: 4499 - DNA, 20 bp, Artificial Sequence
  Synthetic: descartes_0412_BRD1
atgtgatccaaataatctgg

SEQ ID NO: 4500 - DNA, 20 bp, Artificial Sequence
  Synthetic: descartes_0413_BRD1
ctggggactcctcctccacc

SEQ ID NO: 4501 - DNA, 20 bp, Artificial Sequence
  Synthetic: descartes_0414_BRD1
aaggaagaggtaatgcatct

SEQ ID NO: 4502 - DNA, 20 bp, Artificial Sequence
  Synthetic: descartes_0415_BRD1
atgtacaggccagccttctg

SEQ ID NO: 4503 - DNA, 20 bp, Artificial Sequence
  Synthetic: descartes_0416_BRD1
gtccctagctgaggagaagt

SEQ ID NO: 4504 - DNA, 20 bp, Artificial Sequence
  Synthetic: descartes_0417_BRD1
atttcgacatccccgtaaat

SEQ ID NO: 4505 - DNA, 20 bp, Artificial Sequence
  Synthetic: descartes_0418_BRD1
tctgtagtccttccgaggtt

SEQ ID NO: 4506 - DNA, 20 bp, Artificial Sequence
  Synthetic: descartes_0419_BRD1
cttggctgcagaagagtctc

SEQ ID NO: 4507 - DNA, 20 bp, Artificial Sequence
  Synthetic: descartes_0420_BRD2
gaatcctcttccctggtgct

SEQ ID NO: 4508 - DNA, 20 bp, Artificial Sequence
  Synthetic: descartes_0421_BRD2
agagccccacaatggcttcg

SEQ ID NO: 4509 - DNA, 20 bp, Artificial Sequence
  Synthetic: descartes_0422_BRD2
caacttacccctgccaaccc

SEQ ID NO: 4510 - DNA, 20 bp, Artificial Sequence
  Synthetic: descartes_0423_BRD2
ggattggacacctccggggg

SEQ ID NO: 4511 - DNA, 20 bp, Artificial Sequence
  Synthetic: descartes_0424_BRD2
cacagagccttcatcactac

SEQ ID NO: 4512 - DNA, 20 bp, Artificial Sequence
  Synthetic: descartes_0425_BRD2
acagcatccacaggctgccg

SEQ ID NO: 4513 - DNA, 20 bp, Artificial Sequence
  Synthetic: descartes_0426_BRD2
ctcttgggcttggatattgg

SEQ ID NO: 4514 - DNA, 20 bp, Artificial Sequence
  Synthetic: descartes_0427_BRD2
tctcttttcctcttgggctt

SEQ ID NO: 4515 - DNA, 20 bp, Artificial Sequence
  Synthetic: descartes_0428_BRD3
agagtctcaaagtcaatttc

SEQ ID NO: 4516 - DNA, 20 bp, Artificial Sequence
  Synthetic: descartes_0429_BRD3
tgtaaacaagacttgacata

SEQ ID NO: 4517 - DNA, 20 bp, Artificial Sequence
  Synthetic: descartes_0430_BRD3
cagaaaaagcaaaggaaacc

SEQ ID NO: 4518 - DNA, 20 bp, Artificial Sequence
  Synthetic: descartes_0431_BRD3
cagagcgtcttcaccaccac

SEQ ID NO: 4519 - DNA, 20 bp, Artificial Sequence
  Synthetic: descartes_0432_BRD3
atcgtagctcatgggcaggc

SEQ ID NO: 4520 - DNA, 20 bp, Artificial Sequence
  Synthetic: descartes_0433_BRD3
ccaagatgccagatgagccc

SEQ ID NO: 4521 - DNA, 20 bp, Artificial Sequence
  Synthetic: descartes_0434_BRD3
agagcgtgccccccaccgtc

SEQ ID NO: 4522 - DNA, 20 bp, Artificial Sequence
  Synthetic: descartes_0435_BRD3
tctaaagcttgggccattag

SEQ ID NO: 4523 - DNA, 20 bp, Artificial Sequence
  Synthetic: descartes_0436_BRD4
ggaggaggttccttggcttt

SEQ ID NO: 4524 - DNA, 20 bp, Artificial Sequence
  Synthetic: descartes_0437_BRD4
cacggtaccaaacacaactc

SEQ ID NO: 4525 - DNA, 20 bp, Artificial Sequence
  Synthetic: descartes_0438_BRD4
cctggactatcatgatctcg

SEQ ID NO: 4526 - DNA, 20 bp, Artificial Sequence
  Synthetic: descartes_0439_BRD4
cacccacatccaacagcccc

SEQ ID NO: 4527 - DNA, 20 bp, Artificial Sequence
  Synthetic: descartes_0440_BRD4
gtgctgacgtccgattgatg

SEQ ID NO: 4528 - DNA, 20 bp, Artificial Sequence
  Synthetic: descartes_0441_BRD4
cagagtgatctattgtcaat

SEQ ID NO: 4529 - DNA, 20 bp, Artificial Sequence
  Synthetic: descartes_0442_BRD4
tagtccatcccccattactg

SEQ ID NO: 4530 - DNA, 20 bp, Artificial Sequence
  Synthetic: descartes_0443_BRD4
ccaagaagcacgccgcctac

SEQ ID NO: 4531 - DNA, 20 bp, Artificial Sequence
  Synthetic: descartes_0444_BRD7
gagagagagcaggagcagct

SEQ ID NO: 4532 - DNA, 20 bp, Artificial Sequence
  Synthetic: descartes_0445_BRD7
gtaccatgaaagaaaagatc

SEQ ID NO: 4533 - DNA, 20 bp, Artificial Sequence
  Synthetic: descartes_0446_BRD7
caataaaccagagaccattt

SEQ ID NO: 4534 - DNA, 20 bp, Artificial Sequence
  Synthetic: descartes_0447_BRD7
gccacgtgccaagattatcc

SEQ ID NO: 4535 - DNA, 20 bp, Artificial Sequence
  Synthetic: descartes_0448_BRD7
aaagaagaaaaccagatgga

SEQ ID NO: 4536 - DNA, 20 bp, Artificial Sequence
  Synthetic: descartes_0449_BRD7
tctgtatgagggacccaaga

SEQ ID NO: 4537 - DNA, 20 bp, Artificial Sequence
  Synthetic: descartes_0450_BRD7
gactccagtactcaagacag

SEQ ID NO: 4538 - DNA, 20 bp, Artificial Sequence
  Synthetic: descartes_0451_BRD7
agcaccagaccccctccgaa

SEQ ID NO: 4539 - DNA, 20 bp, Artificial Sequence
  Synthetic: descartes_0452_BRD8
actggaggctcactggcaac

SEQ ID NO: 4540 - DNA, 20 bp, Artificial Sequence
  Synthetic: descartes_0453_BRD8
cctccagttgcccacatcaa

SEQ ID NO: 4541 - DNA, 20 bp, Artificial Sequence
  Synthetic: descartes_0454_BRD8
gctggattctgaacaagatc

SEQ ID NO: 4542 - DNA, 20 bp, Artificial Sequence
  Synthetic: descartes_0455_BRD8
gaagaaagccatcatgcttg

SEQ ID NO: 4543 - DNA, 20 bp, Artificial Sequence
  Synthetic: descartes_0456_BRD8
gctgaaagctcttcagtctc

SEQ ID NO: 4544 - DNA, 20 bp, Artificial Sequence
  Synthetic: descartes_0457_BRD8
gaagctggtcctacacagtt

SEQ ID NO: 4545 - DNA, 20 bp, Artificial Sequence
  Synthetic: descartes_0458_BRD8
gaggcagagactcagcacaa

SEQ ID NO: 4546 - DNA, 20 bp, Artificial Sequence
  Synthetic: descartes_0459_BRD8
ctgtatctccccaccatgta

SEQ ID NO: 4547 - DNA, 20 bp, Artificial Sequence
  Synthetic: descartes_0460_BRD9
tgtggatatctccatgctca

SEQ ID NO: 4548 - DNA, 20 bp, Artificial Sequence
  Synthetic: descartes_0461_BRD9
gcaccatgaaagacaaaatt

SEQ ID NO: 4549 - DNA, 20 bp, Artificial Sequence
  Synthetic: descartes_0462_BRD9
ctgtcacggatgcaattgct

SEQ ID NO: 4550 - DNA, 20 bp, Artificial Sequence
  Synthetic: descartes_0463_BRD9
gatgcagaataattcagtat

SEQ ID NO: 4551 - DNA, 20 bp, Artificial Sequence
  Synthetic: descartes_0464_BRD9
tacttgtactggtacaactt

SEQ ID NO: 4552 - DNA, 20 bp, Artificial Sequence
  Synthetic: descartes_0465_BRD9
atggtgccaaaatccatggg

SEQ ID NO: 4553 - DNA, 20 bp, Artificial Sequence
  Synthetic: descartes_0466_BRD9
tgaaggatgctgggagctac

SEQ ID NO: 4554 - DNA, 20 bp, Artificial Sequence
  Synthetic: descartes_0467_BRD9
aagctgatgtgtgataatgc

SEQ ID NO: 4555 - DNA, 20 bp, Artificial Sequence
  Synthetic: descartes_0468_BRDT
attacacctgatggtttcac

SEQ ID NO: 4556 - DNA, 20 bp, Artificial Sequence
  Synthetic: descartes_0469_BRDT
ggcaaaccagtgaaaccatc

SEQ ID NO: 4557 - DNA, 20 bp, Artificial Sequence
  Synthetic: descartes_0470_BRDT
atgtaacataaaggcatact

SEQ ID NO: 4558 - DNA, 20 bp, Artificial Sequence
  Synthetic: descartes_0471_BRDT
gcaaggcagaaagaacaaga

SEQ ID NO: 4559 - DNA, 20 bp, Artificial Sequence
  Synthetic: descartes_0472_BRDT
acagtctgtaaatgttctaa

SEQ ID NO: 4560 - DNA, 20 bp, Artificial Sequence
  Synthetic: descartes_0473_BRDT
ccagattctcagcaacaata

SEQ ID NO: 4561 - DNA, 20 bp, Artificial Sequence
  Synthetic: descartes_0474_BRDT
acagcatccacaggacgttg

SEQ ID NO: 4562 - DNA, 20 bp, Artificial Sequence
  Synthetic: descartes_0475_BRDT
gcagaagaaacagctatatt

SEQ ID NO: 4563 - DNA, 20 bp, Artificial Sequence
  Synthetic: descartes_0476_BRPF1
ccagaggacagcagtgagga

SEQ ID NO: 4564 - DNA, 20 bp, Artificial Sequence
  Synthetic: descartes_0477_BRPF1
accatgaagcagaacttgga

SEQ ID NO: 4565 - DNA, 20 bp, Artificial Sequence
  Synthetic: descartes_0478_BRPF1
tctgagctccagcccttacc

SEQ ID NO: 4566 - DNA, 20 bp, Artificial Sequence
  Synthetic: descartes_0479_BRPF1
gagaacagaactgaggttct

SEQ ID NO: 4567 - DNA, 20 bp, Artificial Sequence
  Synthetic: descartes_0480_BRPF1
tgcgagcaccactcccaagc

SEQ ID NO: 4568 - DNA, 20 bp, Artificial Sequence
  Synthetic: descartes_0481_BRPF1
atgtggtctaggtagtcagg

SEQ ID NO: 4569 - DNA, 20 bp, Artificial Sequence
  Synthetic: descartes_0482_BRPF1
aggaggacttcaacctcatc

SEQ ID NO: 4570 - DNA, 20 bp, Artificial Sequence
  Synthetic: descartes_0483_BRPF1
agtgtccgcaagacagccta

SEQ ID NO: 4571 - DNA, 20 bp, Artificial Sequence
  Synthetic: descartes_0484_BRPF3
ctctgaaaggagagaccact

SEQ ID NO: 4572 - DNA, 20 bp, Artificial Sequence
  Synthetic: descartes_0485_BRPF3
gtgtctgcagatacctttga

SEQ ID NO: 4573 - DNA, 20 bp, Artificial Sequence
  Synthetic: descartes_0486_BRPF3
agtgggtcatagatgctgat

SEQ ID NO: 4574 - DNA, 20 bp, Artificial Sequence
  Synthetic: descartes_0487_BRPF3
accttatagttaccaactgc

SEQ ID NO: 4575 - DNA, 20 bp, Artificial Sequence
  Synthetic: descartes_0488_BRPF3
ggtctcagtggtggactggc

SEQ ID NO: 4576 - DNA, 20 bp, Artificial Sequence
  Synthetic: descartes_0489_BRPF3
attcaccatgtccagccagg

SEQ ID NO: 4577 - DNA, 20 bp, Artificial Sequence
  Synthetic: descartes_0490_BRPF3
tccccagaggtgcagctgaa

SEQ ID NO: 4578 - DNA, 20 bp, Artificial Sequence
  Synthetic: descartes_0491_BRPF3
tgctctcccagcttcagcac

SEQ ID NO: 4579 - DNA, 20 bp, Artificial Sequence
  Synthetic: descartes_0492_BRWD1
gatgcagcaaaccatatgaa

SEQ ID NO: 4580 - DNA, 20 bp, Artificial Sequence
  Synthetic: descartes_0493_BRWD1
gtggggaaccataattcact

SEQ ID NO: 4581 - DNA, 20 bp, Artificial Sequence
  Synthetic: descartes_0494_BRWD1
gattcagatgatgacaaaat

SEQ ID NO: 4582 - DNA, 20 bp, Artificial Sequence
  Synthetic: descartes_0495_BRWD1
gccacaggtagtactgatca

SEQ ID NO: 4583 - DNA, 20 bp, Artificial Sequence
  Synthetic: descartes_0496_BRWD1
gtatcacagtctagacaaag

SEQ ID NO: 4584 - DNA, 20 bp, Artificial Sequence
  Synthetic: descartes_0497_BRWD1
agtgtgaagattctgaacca

SEQ ID NO: 4585 - DNA, 20 bp, Artificial Sequence
  Synthetic: descartes_0498_BRWD1
gaggagataaattctcagta

SEQ ID NO: 4586 - DNA, 20 bp, Artificial Sequence
  Synthetic: descartes_0499_BRWD1
ggatctgtaactgaatcaga

SEQ ID NO: 4587 - DNA, 20 bp, Artificial Sequence
  Synthetic: descartes_0500_BRWD3
gatgcagtaaatactacgaa

SEQ ID NO: 4588 - DNA, 20 bp, Artificial Sequence
  Synthetic: descartes_0501_BRWD3
cttacagcccgaacataagc

SEQ ID NO: 4589 - DNA, 20 bp, Artificial Sequence
  Synthetic: descartes_0502_BRWD3
tcaggaacctcagaacccaa

SEQ ID NO: 4590 - DNA, 20 bp, Artificial Sequence
  Synthetic: descartes_0503_BRWD3
agtagactgcctcgaattaa

SEQ ID NO: 4591 - DNA, 20 bp, Artificial Sequence
  Synthetic: descartes_0504_BRWD3
ccttcatctgcttaccagca

SEQ ID NO: 4592 - DNA, 20 bp, Artificial Sequence
  Synthetic: descartes_0505_BRWD3
gtagccatgtctagcactat

SEQ ID NO: 4593 - DNA, 20 bp, Artificial Sequence
  Synthetic: descartes_0506_BRWD3
ctgagagatccagacctgga

SEQ ID NO: 4594 - DNA, 20 bp, Artificial Sequence
  Synthetic: descartes_0507_BRWD3
cctgcacagattctcatgga

SEQ ID NO: 4595 - DNA, 20 bp, Artificial Sequence
  Synthetic: descartes_0508_BTK
gctgtctgagagcagcagag

SEQ ID NO: 4596 - DNA, 20 bp, Artificial Sequence
  Synthetic: descartes_0509_BTK
gcaaacacagacactgtata

SEQ ID NO: 4597 - DNA, 20 bp, Artificial Sequence
  Synthetic: descartes_0510_BTK
attgtcagagactccagcaa

SEQ ID NO: 4598 - DNA, 20 bp, Artificial Sequence
  Synthetic: descartes_0511_BTK
ccatacttcactaccccaaa

SEQ ID NO: 4599 - DNA, 20 bp, Artificial Sequence
  Synthetic: descartes_0512_BTK
tcttgaccgtgcacaaactc

SEQ ID NO: 4600 - DNA, 20 bp, Artificial Sequence
  Synthetic: descartes_0513_BTK
ctaacagtgagactgctgaa

SEQ ID NO: 4601 - DNA, 20 bp, Artificial Sequence
  Synthetic: descartes_0514_BTK
gagcctactgagcttgtgta

SEQ ID NO: 4602 - DNA, 20 bp, Artificial Sequence
  Synthetic: descartes_0515_BTK
ccatgagaagctggtgcagt

SEQ ID NO: 4603 - DNA, 20 bp, Artificial Sequence
  Synthetic: descartes_0516_BTLA
acagggcattctagttcaaa

SEQ ID NO: 4604 - DNA, 20 bp, Artificial Sequence
  Synthetic: descartes_0517_BTLA
agtctaatctcattgaaagc

SEQ ID NO: 4605 - DNA, 20 bp, Artificial Sequence
  Synthetic: descartes_0518_BTLA
ccttcctgctgtgtcagaga

SEQ ID NO: 4606 - DNA, 20 bp, Artificial Sequence
  Synthetic: descartes_0519_BTLA
tgatagcagtacttgggaat

SEQ ID NO: 4607 - DNA, 20 bp, Artificial Sequence
  Synthetic: descartes_0520_BTLA
aatgagattagactgaaaat

SEQ ID NO: 4608 - DNA, 20 bp, Artificial Sequence
  Synthetic: descartes_0521_BTLA
cctggtgcttgcttctgttt

SEQ ID NO: 4609 - DNA, 20 bp, Artificial Sequence
  Synthetic: descartes_0522_BTLA
tataaagctgtacatcacat

SEQ ID NO: 4610 - DNA, 20 bp, Artificial Sequence
  Synthetic: descartes_0523_BTLA
aaccagtgcttcctaatgac

SEQ ID NO: 4611 - DNA, 20 bp, Artificial Sequence
  Synthetic: descartes_0524_BTN1A1
acttggagactatacaacga

SEQ ID NO: 4612 - DNA, 20 bp, Artificial Sequence
  Synthetic: descartes_0525_BTN1A1
gcagaagtgtctctgatgat

SEQ ID NO: 4613 - DNA, 20 bp, Artificial Sequence
  Synthetic: descartes_0526_BTN1A1
ccgctagaccataggcaaaa

SEQ ID NO: 4614 - DNA, 20 bp, Artificial Sequence
  Synthetic: descartes_0527_BTN1A1
catacaactctacagcccag

SEQ ID NO: 4615 - DNA, 20 bp, Artificial Sequence
  Synthetic: descartes_0528_BTN1A1
agggaggatggaagctacga

SEQ ID NO: 4616 - DNA, 20 bp, Artificial Sequence
  Synthetic: descartes_0529_BTN1A1
cctatggtctagcggtaaaa

SEQ ID NO: 4617 - DNA, 20 bp, Artificial Sequence
  Synthetic: descartes_0530_BTN1A1
gttgtatagtctccaagtga

SEQ ID NO: 4618 - DNA, 20 bp, Artificial Sequence
  Synthetic: descartes_0531_BTN1A1
catctacatcagagtccagg

SEQ ID NO: 4619 - DNA, 20 bp, Artificial Sequence
  Synthetic: descartes_0532_BTN2A1
ggtaccaccctctagatatg

SEQ ID NO: 4620 - DNA, 20 bp, Artificial Sequence
  Synthetic: descartes_0533_BTN2A1
ctctcaacactgtctctaca

SEQ ID NO: 4621 - DNA, 20 bp, Artificial Sequence
  Synthetic: descartes_0534_BTN2A1
cctgaagcgaagctctcccg

SEQ ID NO: 4622 - DNA, 20 bp, Artificial Sequence
  Synthetic: descartes_0535_BTN2A1
cacctccacctcccagtaat

SEQ ID NO: 4623 - DNA, 20 bp, Artificial Sequence
  Synthetic: descartes_0536_BTN2A1
ctgggctgtgatgttgtgta

SEQ ID NO: 4624 - DNA, 20 bp, Artificial Sequence
  Synthetic: descartes_0537_BTN2A1
tgtataaaggtggcagagag

SEQ ID NO: 4625 - DNA, 20 bp, Artificial Sequence
  Synthetic: descartes_0538_BTN2A1
aacgggaaacaagagaaatt

SEQ ID NO: 4626 - DNA, 20 bp, Artificial Sequence
  Synthetic: descartes_0539_BTN2A1
tcgggtgacagatggcagcg

SEQ ID NO: 4627 - DNA, 20 bp, Artificial Sequence
  Synthetic: descartes_0540_BTN2A2
cctgaggcgaagctctccca

SEQ ID NO: 4628 - DNA, 20 bp, Artificial Sequence
  Synthetic: descartes_0541_BTN2A2
catgaaggtcccctgatccc

SEQ ID NO: 4629 - DNA, 20 bp, Artificial Sequence
  Synthetic: descartes_0542_BTN2A2
cacctccacctcccagtaat

SEQ ID NO: 4630 - DNA, 20 bp, Artificial Sequence
  Synthetic: descartes_0543_BTN2A2
ctctcaacactgtgtctgca

SEQ ID NO: 4631 - DNA, 20 bp, Artificial Sequence
  Synthetic: descartes_0544_BTN2A2
ttgatgcaacagatgctgac

SEQ ID NO: 4632 - DNA, 20 bp, Artificial Sequence
  Synthetic: descartes_0545_BTN2A2
aatgaggggcttagacccaa

SEQ ID NO: 4633 - DNA, 20 bp, Artificial Sequence
  Synthetic: descartes_0546_BTN2A2
tgtataagggtgggagagag

SEQ ID NO: 4634 - DNA, 20 bp, Artificial Sequence
  Synthetic: descartes_0547_BTN2A2
tcgggtgacagatggcagcg

SEQ ID NO: 4635 - DNA, 20 bp, Artificial Sequence
  Synthetic: descartes_0548_BTN3A1
atagaagtcaccatcttgga

SEQ ID NO: 4636 - DNA, 20 bp, Artificial Sequence
  Synthetic: descartes_0549_BTN3A1
tgaggaccagaggagtgtgc

SEQ ID NO: 4637 - DNA, 20 bp, Artificial Sequence
  Synthetic: descartes_0550_BTN3A1
ctgtcccctacctccacctc

SEQ ID NO: 4638 - DNA, 20 bp, Artificial Sequence
  Synthetic: descartes_0551_BTN3A1
tctgcacattcttactgcac

SEQ ID NO: 4639 - DNA, 20 bp, Artificial Sequence
  Synthetic: descartes_0552_BTN3A1
ctggccttccttctgctcaa

SEQ ID NO: 4640 - DNA, 20 bp, Artificial Sequence
  Synthetic: descartes_0553_BTN3A1
ctcctgctgttgccacagga

SEQ ID NO: 4641 - DNA, 20 bp, Artificial Sequence
  Synthetic: descartes_0554_BTN3A1
caagatggtgacttctatga

SEQ ID NO: 4642 - DNA, 20 bp, Artificial Sequence
  Synthetic: descartes_0555_BTN3A1
tctcaactcttgctctctct

SEQ ID NO: 4643 - DNA, 20 bp, Artificial Sequence
  Synthetic: descartes_0556_BTN3A2
atagaagtcaccatcttgga

SEQ ID NO: 4644 - DNA, 20 bp, Artificial Sequence
  Synthetic: descartes_0557_BTN3A2
tgatgatgcaggatacaccc

SEQ ID NO: 4645 - DNA, 20 bp, Artificial Sequence
  Synthetic: descartes_0558_BTN3A2
atgtctccctcctcttggtc

SEQ ID NO: 4646 - DNA, 20 bp, Artificial Sequence
  Synthetic: descartes_0559_BTN3A2
caagatggtgacttctatga

SEQ ID NO: 4647 - DNA, 20 bp, Artificial Sequence
  Synthetic: descartes_0560_BTN3A2
tatctcactggacagagcag

SEQ ID NO: 4648 - DNA, 20 bp, Artificial Sequence
  Synthetic: descartes_0561_BTN3A2
cttctgttgtctccacaaga

SEQ ID NO: 4649 - DNA, 20 bp, Artificial Sequence
  Synthetic: descartes_0562_BTN3A2
catctgcatacacgttcacc

SEQ ID NO: 4650 - DNA, 20 bp, Artificial Sequence
  Synthetic: descartes_0563_BTN3A2
ccgctctgttgcagcatatc

SEQ ID NO: 4651 - DNA, 20 bp, Artificial Sequence
  Synthetic: descartes_0564_BTN3A3
gtagaagtcaccatcttgga

SEQ ID NO: 4652 - DNA, 20 bp, Artificial Sequence
  Synthetic: descartes_0565_BTN3A3
acagccaaggacacagtaac

SEQ ID NO: 4653 - DNA, 20 bp, Artificial Sequence
  Synthetic: descartes_0566_BTN3A3
tgaggaccagaggagtgtgc

SEQ ID NO: 4654 - DNA, 20 bp, Artificial Sequence
  Synthetic: descartes_0567_BTN3A3
tgtcccccacttccacctcc

SEQ ID NO: 4655 - DNA, 20 bp, Artificial Sequence
  Synthetic: descartes_0568_BTN3A3
ccgtgtctggatccagaatc

SEQ ID NO: 4656 - DNA, 20 bp, Artificial Sequence
  Synthetic: descartes_0569_BTN3A3
ctctccacgttcttactaca

SEQ ID NO: 4657 - DNA, 20 bp, Artificial Sequence
  Synthetic: descartes_0570_BTN3A3
cttctgttgtctccacaaga

SEQ ID NO: 4658 - DNA, 20 bp, Artificial Sequence
  Synthetic: descartes_0571_BTN3A3
tgatgatgcaggatacaccc

SEQ ID NO: 4659 - DNA, 20 bp, Artificial Sequence
  Synthetic: descartes_0572_BTNL2
cctttgcaatgccattctct

SEQ ID NO: 4660 - DNA, 20 bp, Artificial Sequence
  Synthetic: descartes_0573_BTNL2
ggcgaggagaaaatcgcaac

SEQ ID NO: 4661 - DNA, 20 bp, Artificial Sequence
  Synthetic: descartes_0574_BTNL2
tccacagtagttcccatcct

SEQ ID NO: 4662 - DNA, 20 bp, Artificial Sequence
  Synthetic: descartes_0575_BTNL2
caggctacaatctgtctggt

SEQ ID NO: 4663 - DNA, 20 bp, Artificial Sequence
  Synthetic: descartes_0576_BTNL2
caggatgggaactactgtgg

SEQ ID NO: 4664 - DNA, 20 bp, Artificial Sequence
  Synthetic: descartes_0577_BTNL2
aaaaaggcagcggtactgcc

SEQ ID NO: 4665 - DNA, 20 bp, Artificial Sequence
  Synthetic: descartes_0578_BTNL2
tcctcgcccaaaaaggggat

SEQ ID NO: 4666 - DNA, 20 bp, Artificial Sequence
  Synthetic: descartes_0579_BTNL2
cttccatgtccctccatggc

SEQ ID NO: 4667 - DNA, 20 bp, Artificial Sequence
  Synthetic: descartes_0580_BTNL3
ctgagaccagtgcagaggct

SEQ ID NO: 4668 - DNA, 20 bp, Artificial Sequence
  Synthetic: descartes_0581_BTNL3
gccttagagagacacgcccc

SEQ ID NO: 4669 - DNA, 20 bp, Artificial Sequence
  Synthetic: descartes_0582_BTNL3
agatcagaaacgcagagctt

SEQ ID NO: 4670 - DNA, 20 bp, Artificial Sequence
  Synthetic: descartes_0583_BTNL3
tcccacgtccacctcccagt

SEQ ID NO: 4671 - DNA, 20 bp, Artificial Sequence
  Synthetic: descartes_0584_BTNL3
tgatctgaaaactgtaaccc

SEQ ID NO: 4672 - DNA, 20 bp, Artificial Sequence
  Synthetic: descartes_0585_BTNL3
cctgcttggaaaccctgaga

SEQ ID NO: 4673 - DNA, 20 bp, Artificial Sequence
  Synthetic: descartes_0586_BTNL3
tcttcagactccagagcaaa

SEQ ID NO: 4674 - DNA, 20 bp, Artificial Sequence
  Synthetic: descartes_0587_BTNL3
cgatgaggaggccacctggg

SEQ ID NO: 4675 - DNA, 20 bp, Artificial Sequence
  Synthetic: descartes_0588_BTNL8
ctgtctcctaagaccaatgc

SEQ ID NO: 4676 - DNA, 20 bp, Artificial Sequence
  Synthetic: descartes_0589_BTNL8
gttctgagtctcctcaagct

SEQ ID NO: 4677 - DNA, 20 bp, Artificial Sequence
  Synthetic: descartes_0590_BTNL8
agatcagaaacgcagagctt

SEQ ID NO: 4678 - DNA, 20 bp, Artificial Sequence
  Synthetic: descartes_0591_BTNL8
atgtgaaatacaaatgttct

SEQ ID NO: 4679 - DNA, 20 bp, Artificial Sequence
  Synthetic: descartes_0592_BTNL8
tgatctgaaaactgtaaccc

SEQ ID NO: 4680 - DNA, 20 bp, Artificial Sequence
  Synthetic: descartes_0593_BTNL8
tccacagactccaggacaaa

SEQ ID NO: 4681 - DNA, 20 bp, Artificial Sequence
  Synthetic: descartes_0594_BTNL8
cctgcttggaaactctgaga

SEQ ID NO: 4682 - DNA, 20 bp, Artificial Sequence
  Synthetic: descartes_0595_BTNL8
atgtggagatctctctgacc

SEQ ID NO: 4683 - DNA, 20 bp, Artificial Sequence
  Synthetic: descartes_0596_BTNL9
gccagccaccctcctggaga

SEQ ID NO: 4684 - DNA, 20 bp, Artificial Sequence
  Synthetic: descartes_0597_BTNL9
ctgggcatccagctgtggcc

SEQ ID NO: 4685 - DNA, 20 bp, Artificial Sequence
  Synthetic: descartes_0598_BTNL9
aagccatcgtctgggatgcc

SEQ ID NO: 4686 - DNA, 20 bp, Artificial Sequence
  Synthetic: descartes_0599_BTNL9
cagactgaacaggtcctggg

SEQ ID NO: 4687 - DNA, 20 bp, Artificial Sequence
  Synthetic: descartes_0600_BTNL9
ttctggctcaagaggagatt

SEQ ID NO: 4688 - DNA, 20 bp, Artificial Sequence
  Synthetic: descartes_0601_BUB1
gataagaagaaataccacaa

SEQ ID NO: 4689 - DNA, 20 bp, Artificial Sequence
  Synthetic: descartes_0602_BUB1
ctgagaataaagaatacttg

SEQ ID NO: 4690 - DNA, 20 bp, Artificial Sequence
  Synthetic: descartes_0603_BUB1
tgtacaaccatgggattgga

SEQ ID NO: 4691 - DNA, 20 bp, Artificial Sequence
  Synthetic: descartes_0604_BUB1
gatgccaaagatgagtgcac

SEQ ID NO: 4692 - DNA, 20 bp, Artificial Sequence
  Synthetic: descartes_0605_BUB1
atatctatactctgacccag

SEQ ID NO: 4693 - DNA, 20 bp, Artificial Sequence
  Synthetic: descartes_0606_BUB1
gaacaggatgatgaagatga

SEQ ID NO: 4694 - DNA, 20 bp, Artificial Sequence
  Synthetic: descartes_0607_BUB1
gtgaacgcttacattctaag

SEQ ID NO: 4695 - DNA, 20 bp, Artificial Sequence
  Synthetic: descartes_0608_BUB1
gtgtccccagccaccagcca

SEQ ID NO: 4696 - DNA, 20 bp, Artificial Sequence
  Synthetic: descartes_0609_C17orf99
cccaaaggccgctgggtgct

SEQ ID NO: 4697 - DNA, 20 bp, Artificial Sequence
  Synthetic: descartes_0610_C17orf99
gggggttcaggatagggaat

SEQ ID NO: 4698 - DNA, 20 bp, Artificial Sequence
  Synthetic: descartes_0611_C17orf99
gggaaaacttccaggacttt

SEQ ID NO: 4699 - DNA, 20 bp, Artificial Sequence
  Synthetic: descartes_0612_C17orf99
cagcctggcaccagaaccag

SEQ ID NO: 4700 - DNA, 20 bp, Artificial Sequence
  Synthetic: descartes_0613_C17orf99
cgtcctctgacctccccatt

SEQ ID NO: 4701 - DNA, 20 bp, Artificial Sequence
  Synthetic: descartes_0614_C17orf99
taggcaatggagaccacagg

SEQ ID NO: 4702 - DNA, 20 bp, Artificial Sequence
  Synthetic: descartes_0615_C1QA
ccactgggacagcacctgga

SEQ ID NO: 4703 - DNA, 20 bp, Artificial Sequence
  Synthetic: descartes_0616_C1QA
cagagggcccaggttccccc

SEQ ID NO: 4704 - DNA, 20 bp, Artificial Sequence
  Synthetic: descartes_0617_C1QA
aacccagacctggtcaccct

SEQ ID NO: 4705 - DNA, 20 bp, Artificial Sequence
  Synthetic: descartes_0618_C1QA
ctgggctgcccttggtgcct

SEQ ID NO: 4706 - DNA, 20 bp, Artificial Sequence
  Synthetic: descartes_0619_C1QA
ccagggctctgaggccgaca

SEQ ID NO: 4707 - DNA, 20 bp, Artificial Sequence
  Synthetic: descartes_0620_C1QA
ttcccgtctggtgctcggca

SEQ ID NO: 4708 - DNA, 20 bp, Artificial Sequence
  Synthetic: descartes_0621_C1QA
aggccttggatgcctgtccg

SEQ ID NO: 4709 - DNA, 20 bp, Artificial Sequence
  Synthetic: descartes_0622_C1QA
attcccgggatgccacgggc

SEQ ID NO: 4710 - DNA, 20 bp, Artificial Sequence
  Synthetic: descartes_0623_C1QB
ctggattcccaggaatccct

SEQ ID NO: 4711 - DNA, 20 bp, Artificial Sequence
  Synthetic: descartes_0624_C1QB
tgggtggccttgtagtctcc

SEQ ID NO: 4712 - DNA, 20 bp, Artificial Sequence
  Synthetic: descartes_0625_C1QB
cgggttcctgctctttccag

SEQ ID NO: 4713 - DNA, 20 bp, Artificial Sequence
  Synthetic: descartes_0626_C1QB
tccctggggtcccaggttgg

SEQ ID NO: 4714 - DNA, 20 bp, Artificial Sequence
  Synthetic: descartes_0627_C1QB
gggcccatggggcccttggg

SEQ ID NO: 4715 - DNA, 20 bp, Artificial Sequence
  Synthetic: descartes_0628_C1QB
gggcctggggctccaggggc

SEQ ID NO: 4716 - DNA, 20 bp, Artificial Sequence
  Synthetic: descartes_0629_C1QB
tctccttttatccctggggt

SEQ ID NO: 4717 - DNA, 20 bp, Artificial Sequence
  Synthetic: descartes_0630_C1QBP
gtggttgaagttataaagaa

SEQ ID NO: 4718 - DNA, 20 bp, Artificial Sequence
  Synthetic: descartes_0631_C1QBP
gcttctgtcccattcagttc

SEQ ID NO: 4719 - DNA, 20 bp, Artificial Sequence
  Synthetic: descartes_0632_C1QBP
cccggcaactttccgcacta

SEQ ID NO: 4720 - DNA, 20 bp, Artificial Sequence
  Synthetic: descartes_0633_C1QBP
agtccactggcgagtctgaa

SEQ ID NO: 4721 - DNA, 20 bp, Artificial Sequence
  Synthetic: descartes_0634_C1QBP
atcactcaggaaatcaacaa

SEQ ID NO: 4722 - DNA, 20 bp, Artificial Sequence
  Synthetic: descartes_0635_C1QBP
cttgccgaccgaggggtgga

SEQ ID NO: 4723 - DNA, 20 bp, Artificial Sequence
  Synthetic: descartes_0636_C1QBP
atggtgaggaggaaccctcg

SEQ ID NO: 4724 - DNA, 20 bp, Artificial Sequence
  Synthetic: descartes_0637_C1QBP
cagatgagctggtggagctc

SEQ ID NO: 4725 - DNA, 20 bp, Artificial Sequence
  Synthetic: descartes_0638_C1QC
ccaggatggccgggtaagcc

SEQ ID NO: 4726 - DNA, 20 bp, Artificial Sequence
  Synthetic: descartes_0639_C1QC
gacgtgtggccacagaaggt

SEQ ID NO: 4727 - DNA, 20 bp, Artificial Sequence
  Synthetic: descartes_0640_C1QC
tgcttgtatctgccctcctc

SEQ ID NO: 4728 - DNA, 20 bp, Artificial Sequence
  Synthetic: descartes_0641_C1QC
tctaccacgcgtcgcataca

SEQ ID NO: 4729 - DNA, 20 bp, Artificial Sequence
  Synthetic: descartes_0642_C1QC
caggtgaacttgccagtgct

SEQ ID NO: 4730 - DNA, 20 bp, Artificial Sequence
  Synthetic: descartes_0643_C1QC
ggtcctcggatcccgggaat

SEQ ID NO: 4731 - DNA, 20 bp, Artificial Sequence
  Synthetic: descartes_0644_C1QC
acgccgctgcggtacagcag

SEQ ID NO: 4732 - DNA, 20 bp, Artificial Sequence
  Synthetic: descartes_0645_C1R
gagatgggtgtccagcacag

SEQ ID NO: 4733 - DNA, 20 bp, Artificial Sequence
  Synthetic: descartes_0646_C1R
agagaacacatccatcctat

SEQ ID NO: 4734 - DNA, 20 bp, Artificial Sequence
  Synthetic: descartes_0647_C1R
tgtggcccaggaacacatcc

SEQ ID NO: 4735 - DNA, 20 bp, Artificial Sequence
  Synthetic: descartes_0648_C1R
acctggagccttctgaaggc

SEQ ID NO: 4736 - DNA, 20 bp, Artificial Sequence
  Synthetic: descartes_0649_C1R
gtgtagaagccatagcccct

SEQ ID NO: 4737 - DNA, 20 bp, Artificial Sequence
  Synthetic: descartes_0650_C1R
ctccgggaagcacattcatc

SEQ ID NO: 4738 - DNA, 20 bp, Artificial Sequence
  Synthetic: descartes_0651_C1R
gggaggtgacttcccctctg

SEQ ID NO: 4739 - DNA, 20 bp, Artificial Sequence
  Synthetic: descartes_0652_C1R
cagtaagggacccgaacact

SEQ ID NO: 4740 - DNA, 20 bp, Artificial Sequence
  Synthetic: descartes_0653_C1RL
gtagagggccaggaagccct

SEQ ID NO: 4741 - DNA, 20 bp, Artificial Sequence
  Synthetic: descartes_0654_C1RL
gagtgagggcttctccagag

SEQ ID NO: 4742 - DNA, 20 bp, Artificial Sequence
  Synthetic: descartes_0655_C1RL
tctcaggaagaaccagagtg

SEQ ID NO: 4743 - DNA, 20 bp, Artificial Sequence
  Synthetic: descartes_0656_C1RL
ccccacactctgggtccagg

SEQ ID NO: 4744 - DNA, 20 bp, Artificial Sequence
  Synthetic: descartes_0657_C1RL
gcatggagatgggctggcta

SEQ ID NO: 4745 - DNA, 20 bp, Artificial Sequence
  Synthetic: descartes_0658_C1RL
gcggggacatcgccctcctg

SEQ ID NO: 4746 - DNA, 20 bp, Artificial Sequence
  Synthetic: descartes_0659_C1RL
tgacaatatgttctgtgttg

SEQ ID NO: 4747 - DNA, 20 bp, Artificial Sequence
  Synthetic: descartes_0660_C1RL
ctgtgaggctcgtcttccag

SEQ ID NO: 4748 - DNA, 20 bp, Artificial Sequence
  Synthetic: descartes_0661_C1S
cctccacaacatgagcagcc

SEQ ID NO: 4749 - DNA, 20 bp, Artificial Sequence
  Synthetic: descartes_0662_C1S
catgtagtaatatggctcct

SEQ ID NO: 4750 - DNA, 20 bp, Artificial Sequence
  Synthetic: descartes_0663_C1S
ggagcctgcgaaggcaaaat

SEQ ID NO: 4751 - DNA, 20 bp, Artificial Sequence
  Synthetic: descartes_0664_C1S
gaagatgatatcaagagcat

SEQ ID NO: 4752 - DNA, 20 bp, Artificial Sequence
  Synthetic: descartes_0665_C1S
ccttcgcaggctcccaaaca

SEQ ID NO: 4753 - DNA, 20 bp, Artificial Sequence
  Synthetic: descartes_0666_C1S
ctgcatagtcttcattatcc

SEQ ID NO: 4754 - DNA, 20 bp, Artificial Sequence
  Synthetic: descartes_0667_C1S
atatctgcatcggatcctcc

SEQ ID NO: 4755 - DNA, 20 bp, Artificial Sequence
  Synthetic: descartes_0668_C1S
tgctgagcctaccatgtatg

SEQ ID NO: 4756 - DNA, 20 bp, Artificial Sequence
  Synthetic: descartes_0669_C2
cagaccgccttagacagaga

SEQ ID NO: 4757 - DNA, 20 bp, Artificial Sequence
  Synthetic: descartes_0670_C2
cgggagtttttgtcagcaga

SEQ ID NO: 4758 - DNA, 20 bp, Artificial Sequence
  Synthetic: descartes_0671_C2
ctgccaggccatcgtttcca

SEQ ID NO: 4759 - DNA, 20 bp, Artificial Sequence
  Synthetic: descartes_0672_C2
cctcagagcccaaagtcctc

SEQ ID NO: 4760 - DNA, 20 bp, Artificial Sequence
  Synthetic: descartes_0673_C2
ttgggagacaacctcggcac

SEQ ID NO: 4761 - DNA, 20 bp, Artificial Sequence
  Synthetic: descartes_0674_C2
caggctgctgatcacctcag

SEQ ID NO: 4762 - DNA, 20 bp, Artificial Sequence
  Synthetic: descartes_0675_C2
gttgttcatcatgagataga

SEQ ID NO: 4763 - DNA, 20 bp, Artificial Sequence
  Synthetic: descartes_0676_C2
cgacacactctgcgaacagt

SEQ ID NO: 4764 - DNA, 20 bp, Artificial Sequence
  Synthetic: descartes_0677_C20orf196
tgagacaggcacttgcagac

SEQ ID NO: 4765 - DNA, 20 bp, Artificial Sequence
  Synthetic: descartes_0678_C20orf196
ctcttgcagcagaatgtaat

SEQ ID NO: 4766 - DNA, 20 bp, Artificial Sequence
  Synthetic: descartes_0679_C20orf196
gatgatgaaaagccaaaccc

SEQ ID NO: 4767 - DNA, 20 bp, Artificial Sequence
  Synthetic: descartes_0680_C20orf196
cgaaggccatcatcctcttc

SEQ ID NO: 4768 - DNA, 20 bp, Artificial Sequence
  Synthetic: descartes_0681_C20orf196
atcatccaaagatgtacttc

SEQ ID NO: 4769 - DNA, 20 bp, Artificial Sequence
  Synthetic: descartes_0682_C20orf196
aaatggcccgggtgatcttc

SEQ ID NO: 4770 - DNA, 20 bp, Artificial Sequence
  Synthetic: descartes_0683_C20orf196
atagaatctatccagggatt

SEQ ID NO: 4771 - DNA, 20 bp, Artificial Sequence
  Synthetic: descartes_0684_C20orf196
gctctcctggcctcttagtt

SEQ ID NO: 4772 - DNA, 20 bp, Artificial Sequence
  Synthetic: descartes_0685_C3
cctgggaagtcgtggacagt

SEQ ID NO: 4773 - DNA, 20 bp, Artificial Sequence
  Synthetic: descartes_0686_C3
gaggtcatagtggagcctac

SEQ ID NO: 4774 - DNA, 20 bp, Artificial Sequence
  Synthetic: descartes_0687_C3
ggtggctctttcaagtcctc

SEQ ID NO: 4775 - DNA, 20 bp, Artificial Sequence
  Synthetic: descartes_0688_C3
tctgtaggctccactatgac

SEQ ID NO: 4776 - DNA, 20 bp, Artificial Sequence
  Synthetic: descartes_0689_C3
cctgcctgaatccctcaagc

SEQ ID NO: 4777 - DNA, 20 bp, Artificial Sequence
  Synthetic: descartes_0690_C3
acagtcacagctgaaggaaa

SEQ ID NO: 4778 - DNA, 20 bp, Artificial Sequence
  Synthetic: descartes_0691_C3
atagtaggctcggatcttcc

SEQ ID NO: 4779 - DNA, 20 bp, Artificial Sequence
  Synthetic: descartes_0692_C3
gaacaacagagtagggtagc

SEQ ID NO: 4780 - DNA, 20 bp, Artificial Sequence
  Synthetic: descartes_0693_C4A
acaggaatgccagaagctgg

SEQ ID NO: 4781 - DNA, 20 bp, Artificial Sequence
  Synthetic: descartes_0694_C4A
tgccacggtgtcttctcctg

SEQ ID NO: 4782 - DNA, 20 bp, Artificial Sequence
  Synthetic: descartes_0695_C4A
ctgaatgtcctggacttcag

SEQ ID NO: 4783 - DNA, 20 bp, Artificial Sequence
  Synthetic: descartes_0696_C4A
tgtctattgagcggccggat

SEQ ID NO: 4784 - DNA, 20 bp, Artificial Sequence
  Synthetic: descartes_0697_C4A
tggaccatcacctggcaccc

SEQ ID NO: 4785 - DNA, 20 bp, Artificial Sequence
  Synthetic: descartes_0698_C4A
tggccttctactaccatgga

SEQ ID NO: 4786 - DNA, 20 bp, Artificial Sequence
  Synthetic: descartes_0699_C4A
taagtggagcttcacggact

SEQ ID NO: 4787 - DNA, 20 bp, Artificial Sequence
  Synthetic: descartes_0700_C4A
aagctatgaacagctatgac

SEQ ID NO: 4788 - DNA, 20 bp, Artificial Sequence
  Synthetic: descartes_0701_C4B
cctctcaaaggcagagttcc

SEQ ID NO: 4789 - DNA, 20 bp, Artificial Sequence
  Synthetic: descartes_0702_C4B
agagggaaatgtggctctgt

SEQ ID NO: 4790 - DNA, 20 bp, Artificial Sequence
  Synthetic: descartes_0703_C4B
tgtcatctcccttctccttg

SEQ ID NO: 4791 - DNA, 20 bp, Artificial Sequence
  Synthetic: descartes_0704_C4B
tggaccatcacctggcaccc

SEQ ID NO: 4792 - DNA, 20 bp, Artificial Sequence
  Synthetic: descartes_0705_C4B
tggccttctactaccatgga

SEQ ID NO: 4793 - DNA, 20 bp, Artificial Sequence
  Synthetic: descartes_0706_C4B
taagtggagcttcacggact

SEQ ID NO: 4794 - DNA, 20 bp, Artificial Sequence
  Synthetic: descartes_0707_C4B
acaggaatgccagaagctgg

SEQ ID NO: 4795 - DNA, 20 bp, Artificial Sequence
  Synthetic: descartes_0708_C4B
tgccacggtgtcttctcctg

SEQ ID NO: 4796 - DNA, 20 bp, Artificial Sequence
  Synthetic: descartes_0709_C4BPA
ggagacactgcatgagtctt

SEQ ID NO: 4797 - DNA, 20 bp, Artificial Sequence
  Synthetic: descartes_0710_C4BPA
atgtcatgagaccagtaggt

SEQ ID NO: 4798 - DNA, 20 bp, Artificial Sequence
  Synthetic: descartes_0711_C4BPA
ccaggaagcatgtggaatgt

SEQ ID NO: 4799 - DNA, 20 bp, Artificial Sequence
  Synthetic: descartes_0712_C4BPA
ctatcagcatcacaatgaat

SEQ ID NO: 4800 - DNA, 20 bp, Artificial Sequence
  Synthetic: descartes_0713_C4BPA
agatggaccccataccaagg

SEQ ID NO: 4801 - DNA, 20 bp, Artificial Sequence
  Synthetic: descartes_0714_C4BPA
tatgaagagccccagatgga

SEQ ID NO: 4802 - DNA, 20 bp, Artificial Sequence
  Synthetic: descartes_0715_C4BPA
cagagacagcttatatacct

SEQ ID NO: 4803 - DNA, 20 bp, Artificial Sequence
  Synthetic: descartes_0716_C4BPA
gcctgtccgaccagaatgta

SEQ ID NO: 4804 - DNA, 20 bp, Artificial Sequence
  Synthetic: descartes_0717_C4BPB
ccttcaactcagctttcttc

SEQ ID NO: 4805 - DNA, 20 bp, Artificial Sequence
  Synthetic: descartes_0718_C4BPB
tgtgcaatgaccactacatc

SEQ ID NO: 4806 - DNA, 20 bp, Artificial Sequence
  Synthetic: descartes_0719_C4BPB
gctcctccattgtcatgcca

SEQ ID NO: 4807 - DNA, 20 bp, Artificial Sequence
  Synthetic: descartes_0720_C4BPB
aaggaaataacttcacctta

SEQ ID NO: 4808 - DNA, 20 bp, Artificial Sequence
  Synthetic: descartes_0721_C4BPB
ggagcttcctggatcaactt

SEQ ID NO: 4809 - DNA, 20 bp, Artificial Sequence
  Synthetic: descartes_0722_C4BPB
gtgtgcgtgctgtcttatgg

SEQ ID NO: 4810 - DNA, 20 bp, Artificial Sequence
  Synthetic: descartes_0723_C4BPB
ctaccaggtggtagcccttg

SEQ ID NO: 4811 - DNA, 20 bp, Artificial Sequence
  Synthetic: descartes_0724_C4BPB
aggagagtaagaacctctgc

SEQ ID NO: 4812 - DNA, 20 bp, Artificial Sequence
  Synthetic: descartes_0725_C5
actggagacttggtttggaa

SEQ ID NO: 4813 - DNA, 20 bp, Artificial Sequence
  Synthetic: descartes_0726_C5
ccctacctgattctctaacc

SEQ ID NO: 4814 - DNA, 20 bp, Artificial Sequence
  Synthetic: descartes_0727_C5
cccaggaagattaaaaaaca

SEQ ID NO: 4815 - DNA, 20 bp, Artificial Sequence
  Synthetic: descartes_0728_C5
gccttgatcgtccacatacc

SEQ ID NO: 4816 - DNA, 20 bp, Artificial Sequence
  Synthetic: descartes_0729_C5
actacctggaaacaggaaat

SEQ ID NO: 4817 - DNA, 20 bp, Artificial Sequence
  Synthetic: descartes_0730_C5
accagactgaatcagacact

SEQ ID NO: 4818 - DNA, 20 bp, Artificial Sequence
  Synthetic: descartes_0731_C5
cctgggagataaaactcacc

SEQ ID NO: 4819 - DNA, 20 bp, Artificial Sequence
  Synthetic: descartes_0732_C5
agatgctccaacacggaata

SEQ ID NO: 4820 - DNA, 20 bp, Artificial Sequence
  Synthetic: descartes_0733_C6
ctggtagtacttatctacta

SEQ ID NO: 4821 - DNA, 20 bp, Artificial Sequence
  Synthetic: descartes_0734_C6
gcagtgaggaactaaagaac

SEQ ID NO: 4822 - DNA, 20 bp, Artificial Sequence
  Synthetic: descartes_0735_C6
attgtgtccaagagaagtta

SEQ ID NO: 4823 - DNA, 20 bp, Artificial Sequence
  Synthetic: descartes_0736_C6
actggaggaatatgtaaaac

SEQ ID NO: 4824 - DNA, 20 bp, Artificial Sequence
  Synthetic: descartes_0737_C6
accgaggaagaagccaaaca

SEQ ID NO: 4825 - DNA, 20 bp, Artificial Sequence
  Synthetic: descartes_0738_C6
ccagtcatagcaggtgtcat

SEQ ID NO: 4826 - DNA, 20 bp, Artificial Sequence
  Synthetic: descartes_0739_C6
aatacaagggtcacagtctg

SEQ ID NO: 4827 - DNA, 20 bp, Artificial Sequence
  Synthetic: descartes_0740_C6
acacagactccaacgattac

SEQ ID NO: 4828 - DNA, 20 bp, Artificial Sequence
  Synthetic: descartes_0741_C7
ggaacagagtcatcaatacc

SEQ ID NO: 4829 - DNA, 20 bp, Artificial Sequence
  Synthetic: descartes_0742_C7
cccacaggaaacattgtacc

SEQ ID NO: 4830 - DNA, 20 bp, Artificial Sequence
  Synthetic: descartes_0743_C7
gtggggatggaaaagatttc

SEQ ID NO: 4831 - DNA, 20 bp, Artificial Sequence
  Synthetic: descartes_0744_C7
acagaggcacaaggtacttc

SEQ ID NO: 4832 - DNA, 20 bp, Artificial Sequence
  Synthetic: descartes_0745_C7
cataagaccaagtactattg

SEQ ID NO: 4833 - DNA, 20 bp, Artificial Sequence
  Synthetic: descartes_0746_C7
tgtggactcagaaaaattaa

SEQ ID NO: 4834 - DNA, 20 bp, Artificial Sequence
  Synthetic: descartes_0747_C7
tgagtccacataaaatagaa

SEQ ID NO: 4835 - DNA, 20 bp, Artificial Sequence
  Synthetic: descartes_0748_C7
cccaacaagccaccgtaaat

SEQ ID NO: 4836 - DNA, 20 bp, Artificial Sequence
  Synthetic: descartes_0749_C8A
agatgaggaaggatgacatt

SEQ ID NO: 4837 - DNA, 20 bp, Artificial Sequence
  Synthetic: descartes_0750_C8A
ggggaaccatctgcagtggt

SEQ ID NO: 4838 - DNA, 20 bp, Artificial Sequence
  Synthetic: descartes_0751_C8A
tcaggagaccattgtaaaaa

SEQ ID NO: 4839 - DNA, 20 bp, Artificial Sequence
  Synthetic: descartes_0752_C8A
gaggctccttgggcattcaa

SEQ ID NO: 4840 - DNA, 20 bp, Artificial Sequence
  Synthetic: descartes_0753_C8A
caatggtctcctgataaacc

SEQ ID NO: 4841 - DNA, 20 bp, Artificial Sequence
  Synthetic: descartes_0754_C8A
ctggatgcctgctctgcata

SEQ ID NO: 4842 - DNA, 20 bp, Artificial Sequence
  Synthetic: descartes_0755_C8A
tcctggcacggaaagcaatc

SEQ ID NO: 4843 - DNA, 20 bp, Artificial Sequence
  Synthetic: descartes_0756_C8A
tcatcatctccatagtagag

SEQ ID NO: 4844 - DNA, 20 bp, Artificial Sequence
  Synthetic: descartes_0757_C8B
cctacagacacacccagact

SEQ ID NO: 4845 - DNA, 20 bp, Artificial Sequence
  Synthetic: descartes_0758_C8B
ggaagccctacaatgtggaa

SEQ ID NO: 4846 - DNA, 20 bp, Artificial Sequence
  Synthetic: descartes_0759_C8B
tctgtgacattgcgttcaaa

SEQ ID NO: 4847 - DNA, 20 bp, Artificial Sequence
  Synthetic: descartes_0760_C8B
gcacaggcatggacgttgtt

SEQ ID NO: 4848 - DNA, 20 bp, Artificial Sequence
  Synthetic: descartes_0761_C8B
ggacccactacatcacagag

SEQ ID NO: 4849 - DNA, 20 bp, Artificial Sequence
  Synthetic: descartes_0762_C8B
actactgatgccaagttcaa

SEQ ID NO: 4850 - DNA, 20 bp, Artificial Sequence
  Synthetic: descartes_0763_C8B
aaaccaaaactgaaaccaga

SEQ ID NO: 4851 - DNA, 20 bp, Artificial Sequence
  Synthetic: descartes_0764_C8B
cctattccagcacagtgagg

SEQ ID NO: 4852 - DNA, 20 bp, Artificial Sequence
  Synthetic: descartes_0765_C8G
gctgtcctgtacctggagcg

SEQ ID NO: 4853 - DNA, 20 bp, Artificial Sequence
  Synthetic: descartes_0766_C8G
ggaaggtactgacagccatg

SEQ ID NO: 4854 - DNA, 20 bp, Artificial Sequence
  Synthetic: descartes_0767_C8G
cagggacctggctccttgtg

SEQ ID NO: 4855 - DNA, 20 bp, Artificial Sequence
  Synthetic: descartes_0768_C8G
ctgcaggagcagggccaccg

SEQ ID NO: 4856 - DNA, 20 bp, Artificial Sequence
  Synthetic: descartes_0769_C8G
agcagcgggtccaggaggcc

SEQ ID NO: 4857 - DNA, 20 bp, Artificial Sequence
  Synthetic: descartes_0770_C9
actggaaccagattatatat

SEQ ID NO: 4858 - DNA, 20 bp, Artificial Sequence
  Synthetic: descartes_0771_C9
gagatatagctgcattaaaa

SEQ ID NO: 4859 - DNA, 20 bp, Artificial Sequence
  Synthetic: descartes_0772_C9
gtgtaagaaaatgccacaca

SEQ ID NO: 4860 - DNA, 20 bp, Artificial Sequence
  Synthetic: descartes_0773_C9
gggatggatcccctaagcac

SEQ ID NO: 4861 - DNA, 20 bp, Artificial Sequence
  Synthetic: descartes_0774_C9
gaatatgaaaaccgaaaact

SEQ ID NO: 4862 - DNA, 20 bp, Artificial Sequence
  Synthetic: descartes_0775_C9
agagaaagccagagatacat

SEQ ID NO: 4863 - DNA, 20 bp, Artificial Sequence
  Synthetic: descartes_0776_C9
atgggaaaagatgcaccgac

SEQ ID NO: 4864 - DNA, 20 bp, Artificial Sequence
  Synthetic: descartes_0777_C9
ccattaaattgtccaaagac

SEQ ID NO: 4865 - DNA, 20 bp, Artificial Sequence
  Synthetic: descartes_0778_CA2
atggaatccagcacatcaac

SEQ ID NO: 4866 - DNA, 20 bp, Artificial Sequence
  Synthetic: descartes_0779_CA2
ctatgatcaagcaacttccc

SEQ ID NO: 4867 - DNA, 20 bp, Artificial Sequence
  Synthetic: descartes_0780_CA2
tccacagtatgctctgaacc

SEQ ID NO: 4868 - DNA, 20 bp, Artificial Sequence
  Synthetic: descartes_0781_CA2
ccgtacccccagtgatggga

SEQ ID NO: 4869 - DNA, 20 bp, Artificial Sequence
  Synthetic: descartes_0782_CA2
gtgttccagtgaaccaagtg

SEQ ID NO: 4870 - DNA, 20 bp, Artificial Sequence
  Synthetic: descartes_0783_CA2
actggggttcacttgatgga

SEQ ID NO: 4871 - DNA, 20 bp, Artificial Sequence
  Synthetic: descartes_0784_CA2
tcctgagagtcatcaaactc

SEQ ID NO: 4872 - DNA, 20 bp, Artificial Sequence
  Synthetic: descartes_0785_CA2
ggaaagctgtgcagcaacct

SEQ ID NO: 4873 - DNA, 20 bp, Artificial Sequence
  Synthetic: descartes_0786_CACNA1F
accatcccagaagaaggaaa

SEQ ID NO: 4874 - DNA, 20 bp, Artificial Sequence
  Synthetic: descartes_0787_CACNA1F
gtagaatctccacagtgaaa

SEQ ID NO: 4875 - DNA, 20 bp, Artificial Sequence
  Synthetic: descartes_0788_CACNA1F
cccatcccaggcacctatca

SEQ ID NO: 4876 - DNA, 20 bp, Artificial Sequence
  Synthetic: descartes_0789_CACNA1F
actgtggagacggtgctcaa

SEQ ID NO: 4877 - DNA, 20 bp, Artificial Sequence
  Synthetic: descartes_0790_CACNA1F
gctgaggcagaagaaggcgc

SEQ ID NO: 4878 - DNA, 20 bp, Artificial Sequence
  Synthetic: descartes_0791_CACNA1F
accagacccacaccaagcga

SEQ ID NO: 4879 - DNA, 20 bp, Artificial Sequence
  Synthetic: descartes_0792_CACNA1F
tctgtgtgccatcctgaaga

SEQ ID NO: 4880 - DNA, 20 bp, Artificial Sequence
  Synthetic: descartes_0793_CACNA1F
cgggaaggctggcaagcatt

SEQ ID NO: 4881 - DNA, 20 bp, Artificial Sequence
  Synthetic: descartes_0794_CADM1
cagtgaccgcagggtgctcc

SEQ ID NO: 4882 - DNA, 20 bp, Artificial Sequence
  Synthetic: descartes_0795_CADM1
ccagctctataccgatcccc

SEQ ID NO: 4883 - DNA, 20 bp, Artificial Sequence
  Synthetic: descartes_0796_CADM1
gctctgtgttccctttgaac

SEQ ID NO: 4884 - DNA, 20 bp, Artificial Sequence
  Synthetic: descartes_0797_CADM1
cgaaagacgtgacagtgatc

SEQ ID NO: 4885 - DNA, 20 bp, Artificial Sequence
  Synthetic: descartes_0798_CADM1
atcatcgactctcacccaag

SEQ ID NO: 4886 - DNA, 20 bp, Artificial Sequence
  Synthetic: descartes_0799_CADM1
tgatgaaggaagatactttt

SEQ ID NO: 4887 - DNA, 20 bp, Artificial Sequence
  Synthetic: descartes_0800_CADM1
tagcagtgaactcaaagtat

SEQ ID NO: 4888 - DNA, 20 bp, Artificial Sequence
  Synthetic: descartes_0801_CADM1
agttcactgctagaaaaatt

SEQ ID NO: 4889 - DNA, 20 bp, Artificial Sequence
  Synthetic: descartes_0802_CALU
actataaacagatgatggtt

SEQ ID NO: 4890 - DNA, 20 bp, Artificial Sequence
  Synthetic: descartes_0803_CALU
ctgggaggagtataaaaatg

SEQ ID NO: 4891 - DNA, 20 bp, Artificial Sequence
  Synthetic: descartes_0804_CALU
ccttgagcaaacccacagaa

SEQ ID NO: 4892 - DNA, 20 bp, Artificial Sequence
  Synthetic: descartes_0805_CALU
atatgaatcaagacggctta

SEQ ID NO: 4893 - DNA, 20 bp, Artificial Sequence
  Synthetic: descartes_0806_CALU
cgaggatgtagagcgacagt

SEQ ID NO: 4894 - DNA, 20 bp, Artificial Sequence
  Synthetic: descartes_0807_CALU
agctccccctccgtcacaaa

SEQ ID NO: 4895 - DNA, 20 bp, Artificial Sequence
  Synthetic: descartes_0808_CALU
tgtactcatcccaggagatt

SEQ ID NO: 4896 - DNA, 20 bp, Artificial Sequence
  Synthetic: descartes_0809_CALU
gggataagaaccgtgatggg

SEQ ID NO: 4897 - DNA, 20 bp, Artificial Sequence
  Synthetic: descartes_0810_CAMK4
gatccaaagaaacggctgac

SEQ ID NO: 4898 - DNA, 20 bp, Artificial Sequence
  Synthetic: descartes_0811_CAMK4
gatgtgagaggcgaagaaga

SEQ ID NO: 4899 - DNA, 20 bp, Artificial Sequence
  Synthetic: descartes_0812_CAMK4
cctgtgacccacggatgctg

SEQ ID NO: 4900 - DNA, 20 bp, Artificial Sequence
  Synthetic: descartes_0813_CAMK4
agatcacgatggacaatccc

SEQ ID NO: 4901 - DNA, 20 bp, Artificial Sequence
  Synthetic: descartes_0814_CAMK4
agcggtatccatgtgtacaa

SEQ ID NO: 4902 - DNA, 20 bp, Artificial Sequence
  Synthetic: descartes_0815_CAMK4
gagatacttcatcccaccag

SEQ ID NO: 4903 - DNA, 20 bp, Artificial Sequence
  Synthetic: descartes_0816_CAMK4
tgtaggggtttcaaatatct

SEQ ID NO: 4904 - DNA, 20 bp, Artificial Sequence
  Synthetic: descartes_0817_CAMK4
tacacatggataccgctcaa

SEQ ID NO: 4905 - DNA, 20 bp, Artificial Sequence
  Synthetic: descartes_0818_CARD11
gattaagcactgcgagtact

SEQ ID NO: 4906 - DNA, 20 bp, Artificial Sequence
  Synthetic: descartes_0819_CARD11
tctccagcttacattcctcc

SEQ ID NO: 4907 - DNA, 20 bp, Artificial Sequence
  Synthetic: descartes_0820_CARD11
attctcccgctccagttcca

SEQ ID NO: 4908 - DNA, 20 bp, Artificial Sequence
  Synthetic: descartes_0821_CARD11
cagagagaacttcctgaaca

SEQ ID NO: 4909 - DNA, 20 bp, Artificial Sequence
  Synthetic: descartes_0822_CARD11
gagactgatttctctccagc

SEQ ID NO: 4910 - DNA, 20 bp, Artificial Sequence
  Synthetic: descartes_0823_CARD11
acagaccatgacctggatat

SEQ ID NO: 4911 - DNA, 20 bp, Artificial Sequence
  Synthetic: descartes_0824_CARD11
gggatgccagccccaggacc

SEQ ID NO: 4912 - DNA, 20 bp, Artificial Sequence
  Synthetic: descartes_0825_CARD11
ccgggggctcggcggtgatt

SEQ ID NO: 4913 - DNA, 20 bp, Artificial Sequence
  Synthetic: descartes_0826_CARM1
tggctacctgtcccagcagc

SEQ ID NO: 4914 - DNA, 20 bp, Artificial Sequence
  Synthetic: descartes_0827_CARM1
aggatgttgtagaaggaaca

SEQ ID NO: 4915 - DNA, 20 bp, Artificial Sequence
  Synthetic: descartes_0828_CARM1
ctaccattggtgacgtccac

SEQ ID NO: 4916 - DNA, 20 bp, Artificial Sequence
  Synthetic: descartes_0829_CARM1
tgttccttctacaacatcct

SEQ ID NO: 4917 - DNA, 20 bp, Artificial Sequence
  Synthetic: descartes_0830_CARM1
agatccaggaggttactgga

SEQ ID NO: 4918 - DNA, 20 bp, Artificial Sequence
  Synthetic: descartes_0831_CARM1
cgagggagatgtgtagtggg

SEQ ID NO: 4919 - DNA, 20 bp, Artificial Sequence
  Synthetic: descartes_0832_CARM1
agtgctcagtgtcccgagag

SEQ ID NO: 4920 - DNA, 20 bp, Artificial Sequence
  Synthetic: descartes_0833_CARM1
ccgcccaagctggagcacgg

SEQ ID NO: 4921 - DNA, 20 bp, Artificial Sequence
  Synthetic: descartes_0834_CASP3
atgcaaagaaacagattcca

SEQ ID NO: 4922 - DNA, 20 bp, Artificial Sequence
  Synthetic: descartes_0835_CASP3
tgtataataattaataataa

SEQ ID NO: 4923 - DNA, 20 bp, Artificial Sequence
  Synthetic: descartes_0836_CASP3
agaggggatcgttgtagaag

SEQ ID NO: 4924 - DNA, 20 bp, Artificial Sequence
  Synthetic: descartes_0837_CASP3
cctgaggtttgctgcatcga

SEQ ID NO: 4925 - DNA, 20 bp, Artificial Sequence
  Synthetic: descartes_0838_CASP3
gaacaaatggacctgttgac

SEQ ID NO: 4926 - DNA, 20 bp, Artificial Sequence
  Synthetic: descartes_0839_CASP3
catgctcacaaaagaactct

SEQ ID NO: 4927 - DNA, 20 bp, Artificial Sequence
  Synthetic: descartes_0840_CASP3
tgacacgccatgtcatcatc

SEQ ID NO: 4928 - DNA, 20 bp, Artificial Sequence
  Synthetic: descartes_0841_CASP3
aggtcaacaggtccatttgt

SEQ ID NO: 4929 - DNA, 20 bp, Artificial Sequence
  Synthetic: descartes_0842_CAV1
gaaggccagcttcaccacct

SEQ ID NO: 4930 - DNA, 20 bp, Artificial Sequence
  Synthetic: descartes_0843_CAV1
ccaacagcttcaaagagtgg

SEQ ID NO: 4931 - DNA, 20 bp, Artificial Sequence
  Synthetic: descartes_0844_CAV1
aagatgtgattgcagaacca

SEQ ID NO: 4932 - DNA, 20 bp, Artificial Sequence
  Synthetic: descartes_0845_CAV1
gcatcccgatggcactcatc

SEQ ID NO: 4933 - DNA, 20 bp, Artificial Sequence
  Synthetic: descartes_0846_CAV1
gtcacagtgaaggtggtgaa

SEQ ID NO: 4934 - DNA, 20 bp, Artificial Sequence
  Synthetic: descartes_0847_CAV1
ccgcttgctgtctgccctct

SEQ ID NO: 4935 - DNA, 20 bp, Artificial Sequence
  Synthetic: descartes_0848_CAV1
ctgcacatctgggcagttgt

SEQ ID NO: 4936 - DNA, 20 bp, Artificial Sequence
  Synthetic: descartes_0849_CAV1
cttcgccattctctctttcc

SEQ ID NO: 4937 - DNA, 20 bp, Artificial Sequence
  Synthetic: descartes_0850_CBX1
tgtgactgcagaaactcagc

SEQ ID NO: 4938 - DNA, 20 bp, Artificial Sequence
  Synthetic: descartes_0851_CBX1
ggaggtactccactttgccc

SEQ ID NO: 4939 - DNA, 20 bp, Artificial Sequence
  Synthetic: descartes_0852_CBX1
ctctcctctcccttatcttc

SEQ ID NO: 4940 - DNA, 20 bp, Artificial Sequence
  Synthetic: descartes_0853_CBX1
atcaggaacatgagctctcc

SEQ ID NO: 4941 - DNA, 20 bp, Artificial Sequence
  Synthetic: descartes_0854_CBX1
tgcagtcacagaaaacagca

SEQ ID NO: 4942 - DNA, 20 bp, Artificial Sequence
  Synthetic: descartes_0855_CBX1
ctcatagaaggatatgacaa

SEQ ID NO: 4943 - DNA, 20 bp, Artificial Sequence
  Synthetic: descartes_0856_CBX1
caccacatattcctcttcct

SEQ ID NO: 4944 - DNA, 20 bp, Artificial Sequence
  Synthetic: descartes_0857_CBX1
tctgtctcatgtgctgtttt

SEQ ID NO: 4945 - DNA, 20 bp, Artificial Sequence
  Synthetic: descartes_0858_CBX2
cgagtagagggacagactgt

SEQ ID NO: 4946 - DNA, 20 bp, Artificial Sequence
  Synthetic: descartes_0859_CBX2
accctgccacccagcagaga

SEQ ID NO: 4947 - DNA, 20 bp, Artificial Sequence
  Synthetic: descartes_0860_CBX2
gccaccaggatctgggcctt

SEQ ID NO: 4948 - DNA, 20 bp, Artificial Sequence
  Synthetic: descartes_0861_CBX2
tgctccacagccccaccgct

SEQ ID NO: 4949 - DNA, 20 bp, Artificial Sequence
  Synthetic: descartes_0862_CBX2
cttcctggagggctcattcc

SEQ ID NO: 4950 - DNA, 20 bp, Artificial Sequence
  Synthetic: descartes_0863_CBX2
tcaccgacgtcactgccaac

SEQ ID NO: 4951 - DNA, 20 bp, Artificial Sequence
  Synthetic: descartes_0864_CBX2
cgtcccccaaggaccccctg

SEQ ID NO: 4952 - DNA, 20 bp, Artificial Sequence
  Synthetic: descartes_0865_CBX2
ctctgggggcaggggctttc

SEQ ID NO: 4953 - DNA, 20 bp, Artificial Sequence
  Synthetic: descartes_0866_CBX3
atgagaaacatcaattctcc

SEQ ID NO: 4954 - DNA, 20 bp, Artificial Sequence
  Synthetic: descartes_0867_CBX3
gattgtccagaattgattga

SEQ ID NO: 4955 - DNA, 20 bp, Artificial Sequence
  Synthetic: descartes_0868_CBX3
tgaagagagactaacttggc

SEQ ID NO: 4956 - DNA, 20 bp, Artificial Sequence
  Synthetic: descartes_0869_CBX3
ccagaggtcttgatcctgaa

SEQ ID NO: 4957 - DNA, 20 bp, Artificial Sequence
  Synthetic: descartes_0870_CBX3
ctgtcatcagattcactgtc

SEQ ID NO: 4958 - DNA, 20 bp, Artificial Sequence
  Synthetic: descartes_0871_CBX3
ccattcactacacgtcgatc

SEQ ID NO: 4959 - DNA, 20 bp, Artificial Sequence
  Synthetic: descartes_0872_CBX3
gccagcaccaagtctgcctc

SEQ ID NO: 4960 - DNA, 20 bp, Artificial Sequence
  Synthetic: descartes_0873_CBX3
ctgaagtggaagggatttac

SEQ ID NO: 4961 - DNA, 20 bp, Artificial Sequence
  Synthetic: descartes_0874_CBX4
cctggagcacccgccgcacc

SEQ ID NO: 4962 - DNA, 20 bp, Artificial Sequence
  Synthetic: descartes_0875_CBX4
ggcttcggccctctcttccg

SEQ ID NO: 4963 - DNA, 20 bp, Artificial Sequence
  Synthetic: descartes_0876_CBX4
gagagcagcccctgcagctc

SEQ ID NO: 4964 - DNA, 20 bp, Artificial Sequence
  Synthetic: descartes_0877_CBX4
ggaatataattatcaccgac

SEQ ID NO: 4965 - DNA, 20 bp, Artificial Sequence
  Synthetic: descartes_0878_CBX4
gcccccgcaccttgcgccca

SEQ ID NO: 4966 - DNA, 20 bp, Artificial Sequence
  Synthetic: descartes_0879_CBX4
cccgtcgttccaatgtcctg

SEQ ID NO: 4967 - DNA, 20 bp, Artificial Sequence
  Synthetic: descartes_0880_CBX4
aaagtcctgtcggcaggagg

SEQ ID NO: 4968 - DNA, 20 bp, Artificial Sequence
  Synthetic: descartes_0881_CBX4
gggtcgggctggtaggggtg

SEQ ID NO: 4969 - DNA, 20 bp, Artificial Sequence
  Synthetic: descartes_0882_CBX5
attaggaacattaaatcacc

SEQ ID NO: 4970 - DNA, 20 bp, Artificial Sequence
  Synthetic: descartes_0883_CBX5
agagaggactggaaccagaa

SEQ ID NO: 4971 - DNA, 20 bp, Artificial Sequence
  Synthetic: descartes_0884_CBX5
tgaagagagactgacatggc

SEQ ID NO: 4972 - DNA, 20 bp, Artificial Sequence
  Synthetic: descartes_0885_CBX5
accctccttcatcttcttat

SEQ ID NO: 4973 - DNA, 20 bp, Artificial Sequence
  Synthetic: descartes_0886_CBX5
caagaaccaggtcagcttca

SEQ ID NO: 4974 - DNA, 20 bp, Artificial Sequence
  Synthetic: descartes_0887_CBX5
tggttccagtcctctctcaa

SEQ ID NO: 4975 - DNA, 20 bp, Artificial Sequence
  Synthetic: descartes_0888_CBX5
tcaggttcccaagtattgtg

SEQ ID NO: 4976 - DNA, 20 bp, Artificial Sequence
  Synthetic: descartes_0889_CBX5
atgtcatcggcactgtttga

SEQ ID NO: 4977 - DNA, 20 bp, Artificial Sequence
  Synthetic: descartes_0890_CBX6
ggtttgggtcccctcttctt

SEQ ID NO: 4978 - DNA, 20 bp, Artificial Sequence
  Synthetic: descartes_0891_CBX6
atgatggattcggccgcgaa

SEQ ID NO: 4979 - DNA, 20 bp, Artificial Sequence
  Synthetic: descartes_0892_CBX6
ggtcccctcttcttgggccc

SEQ ID NO: 4980 - DNA, 20 bp, Artificial Sequence
  Synthetic: descartes_0893_CBX6
gagaaggtggctgctggggt

SEQ ID NO: 4981 - DNA, 20 bp, Artificial Sequence
  Synthetic: descartes_0894_CBX6
tctgtcaagccgagcgccag

SEQ ID NO: 4982 - DNA, 20 bp, Artificial Sequence
  Synthetic: descartes_0895_CBX6
ggatccgccgtttgatgatg

SEQ ID NO: 4983 - DNA, 20 bp, Artificial Sequence
  Synthetic: descartes_0896_CBX6
gcccttctcggagacggtgc

SEQ ID NO: 4984 - DNA, 20 bp, Artificial Sequence
  Synthetic: descartes_0897_CBX6
ttcgaaggctgcaatgagcc

SEQ ID NO: 4985 - DNA, 20 bp, Artificial Sequence
  Synthetic: descartes_0898_CBX7
ggacctctcttcctataccc

SEQ ID NO: 4986 - DNA, 20 bp, Artificial Sequence
  Synthetic: descartes_0899_CBX7
cacttcaccagatactcgac

SEQ ID NO: 4987 - DNA, 20 bp, Artificial Sequence
  Synthetic: descartes_0900_CBX7
ggggccatcctttccacttc

SEQ ID NO: 4988 - DNA, 20 bp, Artificial Sequence
  Synthetic: descartes_0901_CBX7
ggggcttgcggagcgggaag

SEQ ID NO: 4989 - DNA, 20 bp, Artificial Sequence
  Synthetic: descartes_0902_CBX8
cccgtggcctcagctgagct

SEQ ID NO: 4990 - DNA, 20 bp, Artificial Sequence
  Synthetic: descartes_0903_CBX8
accgtcaccattaaggaaag

SEQ ID NO: 4991 - DNA, 20 bp, Artificial Sequence
  Synthetic: descartes_0904_CBX8
aggtcacgtccgtgaccacc

SEQ ID NO: 4992 - DNA, 20 bp, Artificial Sequence
  Synthetic: descartes_0905_CBX8
gggccatagagctccatctc

SEQ ID NO: 4993 - DNA, 20 bp, Artificial Sequence
  Synthetic: descartes_0906_CBX8
gaagtgactcagccaggggc

SEQ ID NO: 4994 - DNA, 20 bp, Artificial Sequence
  Synthetic: descartes_0907_CBX8
cagccggccacagtgtgatc

SEQ ID NO: 4995 - DNA, 20 bp, Artificial Sequence
  Synthetic: descartes_0908_CBX8
cttaatggtgacggtcaaaa

SEQ ID NO: 4996 - DNA, 20 bp, Artificial Sequence
  Synthetic: descartes_0909_CBX8
gaaggccctcccgggcccgg

SEQ ID NO: 4997 - DNA, 20 bp, Artificial Sequence
  Synthetic: descartes_0910_CCDC88B
ggccctcctgctcctccagc

SEQ ID NO: 4998 - DNA, 20 bp, Artificial Sequence
  Synthetic: descartes_0911_CCDC88B
gtgttcctgcagggtctcag

SEQ ID NO: 4999 - DNA, 20 bp, Artificial Sequence
  Synthetic: descartes_0912_CCDC88B
gttggagaagagattcctgc

SEQ ID NO: 5000 - DNA, 20 bp, Artificial Sequence
  Synthetic: descartes_0913_CCDC88B
tcctcaactgtgccacctcc

SEQ ID NO: 5001 - DNA, 20 bp, Artificial Sequence
  Synthetic: descartes_0914_CCDC88B
caggggcagctgcagcacct

SEQ ID NO: 5002 - DNA, 20 bp, Artificial Sequence
  Synthetic: descartes_0915_CCDC88B
ggcctccaaaccctgcacct

SEQ ID NO: 5003 - DNA, 20 bp, Artificial Sequence
  Synthetic: descartes_0916_CCDC88B
gaggccgaaataagaaggct

SEQ ID NO: 5004 - DNA, 20 bp, Artificial Sequence
  Synthetic: descartes_0917_CCDC88B
ccaggctgggtccctgaccg

SEQ ID NO: 5005 - DNA, 20 bp, Artificial Sequence
  Synthetic: descartes_0918_CCL21
tgtggggatggtgtcttgtc

SEQ ID NO: 5006 - DNA, 20 bp, Artificial Sequence
  Synthetic: descartes_0919_CCL21
gctgtacttgaggcaacagt

SEQ ID NO: 5007 - DNA, 20 bp, Artificial Sequence
  Synthetic: descartes_0920_CCL21
ggtctgcacatagctctgcc

SEQ ID NO: 5008 - DNA, 20 bp, Artificial Sequence
  Synthetic: descartes_0921_CCL21
gagccctttcctttcttgcc

SEQ ID NO: 5009 - DNA, 20 bp, Artificial Sequence
  Synthetic: descartes_0922_CCL21
ttgccagtcttggaggcccc

SEQ ID NO: 5010 - DNA, 20 bp, Artificial Sequence
  Synthetic: descartes_0923_CCL21
ctttcttgccagtcttggag

SEQ ID NO: 5011 - DNA, 20 bp, Artificial Sequence
  Synthetic: descartes_0924_CCL5
cctacattgcccgcccactg

SEQ ID NO: 5012 - DNA, 20 bp, Artificial Sequence
  Synthetic: descartes_0925_CCL5
tacaccagtggcaagtgctc

SEQ ID NO: 5013 - DNA, 20 bp, Artificial Sequence
  Synthetic: descartes_0926_CCL5
ttctctgggttggcacacac

SEQ ID NO: 5014 - DNA, 20 bp, Artificial Sequence
  Synthetic: descartes_0927_CCL5
tcacccgaaagaaccgccaa

SEQ ID NO: 5015 - DNA, 20 bp, Artificial Sequence
  Synthetic: descartes_0928_CCND3
ccatgtacccgccatccatg

SEQ ID NO: 5016 - DNA, 20 bp, Artificial Sequence
  Synthetic: descartes_0929_CCND3
accaaggcctgtcggtcacg

SEQ ID NO: 5017 - DNA, 20 bp, Artificial Sequence
  Synthetic: descartes_0930_CCND3
gatggtcaggggcgtggtct

SEQ ID NO: 5018 - DNA, 20 bp, Artificial Sequence
  Synthetic: descartes_0931_CCND3
gggtggggacgcaagacagg

SEQ ID NO: 5019 - DNA, 20 bp, Artificial Sequence
  Synthetic: descartes_0932_CCND3
ctggccttcattctgcaccg

SEQ ID NO: 5020 - DNA, 20 bp, Artificial Sequence
  Synthetic: descartes_0933_CCND3
ggcgctgggctggagctggt

SEQ ID NO: 5021 - DNA, 20 bp, Artificial Sequence
  Synthetic: descartes_0934_CCR2
tgacagggagcaccgtaatc

SEQ ID NO: 5022 - DNA, 20 bp, Artificial Sequence
  Synthetic: descartes_0935_CCR2
ggaagaacaccgagagatac

SEQ ID NO: 5023 - DNA, 20 bp, Artificial Sequence
  Synthetic: descartes_0936_CCR2
cctgctcaacctggccatct

SEQ ID NO: 5024 - DNA, 20 bp, Artificial Sequence
  Synthetic: descartes_0937_CCR2
gagtggggcaatcctacagc

SEQ ID NO: 5025 - DNA, 20 bp, Artificial Sequence
  Synthetic: descartes_0938_CCR2
aggattcccgagtagcagat

SEQ ID NO: 5026 - DNA, 20 bp, Artificial Sequence
  Synthetic: descartes_0939_CCR2
acatagctcttggctgtagg

SEQ ID NO: 5027 - DNA, 20 bp, Artificial Sequence
  Synthetic: descartes_0940_CCR2
tgataaaccgagaacgagat

SEQ ID NO: 5028 - DNA, 20 bp, Artificial Sequence
  Synthetic: descartes_0941_CCR2
aagcaaacacagcatggaca

SEQ ID NO: 5029 - DNA, 20 bp, Artificial Sequence
  Synthetic: descartes_0942_CCR6
gttgaagacaaaagttgagc

SEQ ID NO: 5030 - DNA, 20 bp, Artificial Sequence
  Synthetic: descartes_0943_CCR6
tgagtacctcccggcacagg

SEQ ID NO: 5031 - DNA, 20 bp, Artificial Sequence
  Synthetic: descartes_0944_CCR6
taagaaggccaggtctatga

SEQ ID NO: 5032 - DNA, 20 bp, Artificial Sequence
  Synthetic: descartes_0945_CCR6
tcttcaaccaaaaatacaac

SEQ ID NO: 5033 - DNA, 20 bp, Artificial Sequence
  Synthetic: descartes_0946_CCR6
gtatagccaattagcttttc

SEQ ID NO: 5034 - DNA, 20 bp, Artificial Sequence
  Synthetic: descartes_0947_CCR6
acaatgaacgtgtaacaaaa

SEQ ID NO: 5035 - DNA, 20 bp, Artificial Sequence
  Synthetic: descartes_0948_CCR6
gctctggcaggatcggttca

SEQ ID NO: 5036 - DNA, 20 bp, Artificial Sequence
  Synthetic: descartes_0949_CCR6
gactccagtgaagattattt

SEQ ID NO: 5037 - DNA, 20 bp, Artificial Sequence
  Synthetic: descartes_0950_CCR7
aagaggctcaagaccatgac

SEQ ID NO: 5038 - DNA, 20 bp, Artificial Sequence
  Synthetic: descartes_0951_CCR7
ccatctacaagatgagcttc

SEQ ID NO: 5039 - DNA, 20 bp, Artificial Sequence
  Synthetic: descartes_0952_CCR7
gtgggcctactgggcaatgg

SEQ ID NO: 5040 - DNA, 20 bp, Artificial Sequence
  Synthetic: descartes_0953_CCR7
aagcctggttcctccctatc

SEQ ID NO: 5041 - DNA, 20 bp, Artificial Sequence
  Synthetic: descartes_0954_CCR7
tggtccccctgctggccatg

SEQ ID NO: 5042 - DNA, 20 bp, Artificial Sequence
  Synthetic: descartes_0955_CCR7
agcgcaacaaggccatcaag

SEQ ID NO: 5043 - DNA, 20 bp, Artificial Sequence
  Synthetic: descartes_0956_CCR7
aagttccgcacgtccttctt

SEQ ID NO: 5044 - DNA, 20 bp, Artificial Sequence
  Synthetic: descartes_0957_CCR7
caagctcatctttgccatct

SEQ ID NO: 5045 - DNA, 20 bp, Artificial Sequence
  Synthetic: descartes_0958_CCRL2
ccaggataagcacaaccagg

SEQ ID NO: 5046 - DNA, 20 bp, Artificial Sequence
  Synthetic: descartes_0959_CCRL2
ccttgtgcaaaaacactagg

SEQ ID NO: 5047 - DNA, 20 bp, Artificial Sequence
  Synthetic: descartes_0960_CCRL2
aagtcagaaaatgcttccag

SEQ ID NO: 5048 - DNA, 20 bp, Artificial Sequence
  Synthetic: descartes_0961_CCRL2
ctgtccactttcaaagaaca

SEQ ID NO: 5049 - DNA, 20 bp, Artificial Sequence
  Synthetic: descartes_0962_CCRL2
gcagaactcccttcctgcca

SEQ ID NO: 5050 - DNA, 20 bp, Artificial Sequence
  Synthetic: descartes_0963_CCRL2
tctatgtgcaaatgagaaaa

SEQ ID NO: 5051 - DNA, 20 bp, Artificial Sequence
  Synthetic: descartes_0964_CCRL2
ccataatggtagtcttcctt

SEQ ID NO: 5052 - DNA, 20 bp, Artificial Sequence
  Synthetic: descartes_0965_CCRL2
aattgccttctgactgtgca

SEQ ID NO: 5053 - DNA, 20 bp, Artificial Sequence
  Synthetic: descartes_0966_CD151
cctcaagtacctgctgttta

SEQ ID NO: 5054 - DNA, 20 bp, Artificial Sequence
  Synthetic: descartes_0967_CD151
tgctggagatcatcgctggt

SEQ ID NO: 5055 - DNA, 20 bp, Artificial Sequence
  Synthetic: descartes_0968_CD151
gcatgatcttcacgtgctgc

SEQ ID NO: 5056 - DNA, 20 bp, Artificial Sequence
  Synthetic: descartes_0969_CD151
tgggcagcgagaccatgcct

SEQ ID NO: 5057 - DNA, 20 bp, Artificial Sequence
  Synthetic: descartes_0970_CD160
accaacaccatctatcccag

SEQ ID NO: 5058 - DNA, 20 bp, Artificial Sequence
  Synthetic: descartes_0971_CD160
ttgtaggaagcctgaactga

SEQ ID NO: 5059 - DNA, 20 bp, Artificial Sequence
  Synthetic: descartes_0972_CD160
aactggtctcaggagaacag

SEQ ID NO: 5060 - DNA, 20 bp, Artificial Sequence
  Synthetic: descartes_0973_CD160
ttatgccatacagtacagat

SEQ ID NO: 5061 - DNA, 20 bp, Artificial Sequence
  Synthetic: descartes_0974_CD160
aatcccgtcactgtgtagtt

SEQ ID NO: 5062 - DNA, 20 bp, Artificial Sequence
  Synthetic: descartes_0975_CD160
gtcgcgttccttcctgggaa

SEQ ID NO: 5063 - DNA, 20 bp, Artificial Sequence
  Synthetic: descartes_0976_CD160
aaacagctgagacttaaaag

SEQ ID NO: 5064 - DNA, 20 bp, Artificial Sequence
  Synthetic: descartes_0977_CD160
tgcaaggacaggtctggaga

SEQ ID NO: 5065 - DNA, 20 bp, Artificial Sequence
  Synthetic: descartes_0978_CD1A
ccctggaccaggggcacagg

SEQ ID NO: 5066 - DNA, 20 bp, Artificial Sequence
  Synthetic: descartes_0979_CD1A
caaccattcctggaaacaaa

SEQ ID NO: 5067 - DNA, 20 bp, Artificial Sequence
  Synthetic: descartes_0980_CD1A
ctgtgcccctggtccagggg

SEQ ID NO: 5068 - DNA, 20 bp, Artificial Sequence
  Synthetic: descartes_0981_CD1A
ctgaaccaaagcgcaagacc

SEQ ID NO: 5069 - DNA, 20 bp, Artificial Sequence
  Synthetic: descartes_0982_CD1A
ggtagaatcctgagacatgg

SEQ ID NO: 5070 - DNA, 20 bp, Artificial Sequence
  Synthetic: descartes_0983_CD1A
cagttccttccactcctcat

SEQ ID NO: 5071 - DNA, 20 bp, Artificial Sequence
  Synthetic: descartes_0984_CD1A
agatacaggtgacaggaggc

SEQ ID NO: 5072 - DNA, 20 bp, Artificial Sequence
  Synthetic: descartes_0985_CD1A
atgctgattctgattgagca

SEQ ID NO: 5073 - DNA, 20 bp, Artificial Sequence
  Synthetic: descartes_0986_CD1B
gagggccaggacatcatcct

SEQ ID NO: 5074 - DNA, 20 bp, Artificial Sequence
  Synthetic: descartes_0987_CD1B
atagaggagaattctcacag

SEQ ID NO: 5075 - DNA, 20 bp, Artificial Sequence
  Synthetic: descartes_0988_CD1B
ctgagtgtcaagaatgcttc

SEQ ID NO: 5076 - DNA, 20 bp, Artificial Sequence
  Synthetic: descartes_0989_CD1B
catgataccttgatattgta

SEQ ID NO: 5077 - DNA, 20 bp, Artificial Sequence
  Synthetic: descartes_0990_CD1B
atgttatccagacctcgtcc

SEQ ID NO: 5078 - DNA, 20 bp, Artificial Sequence
  Synthetic: descartes_0991_CD1B
gtgataaggaggttgctgag

SEQ ID NO: 5079 - DNA, 20 bp, Artificial Sequence
  Synthetic: descartes_0992_CD1B
gcaataatagtgccttcctt

SEQ ID NO: 5080 - DNA, 20 bp, Artificial Sequence
  Synthetic: descartes_0993_CD1B
tgtgccctgctgccaccttc

SEQ ID NO: 5081 - DNA, 20 bp, Artificial Sequence
  Synthetic: descartes_0994_CD1C
gcccaaagtgtctgtcatct

SEQ ID NO: 5082 - DNA, 20 bp, Artificial Sequence
  Synthetic: descartes_0995_CD1C
ggtgacatggatgcggaatg

SEQ ID NO: 5083 - DNA, 20 bp, Artificial Sequence
  Synthetic: descartes_0996_CD1C
gtgcccagttgctcctgttc

SEQ ID NO: 5084 - DNA, 20 bp, Artificial Sequence
  Synthetic: descartes_0997_CD1C
tgtgacgccttcatactgat

SEQ ID NO: 5085 - DNA, 20 bp, Artificial Sequence
  Synthetic: descartes_0998_CD1C
ctgagtttccagaatacaac

SEQ ID NO: 5086 - DNA, 20 bp, Artificial Sequence
  Synthetic: descartes_0999_CD1C
ggtagaagccggaggcatga

SEQ ID NO: 5087 - DNA, 20 bp, Artificial Sequence
  Synthetic: descartes_1000_CD1C
cagaatacaacatgggtgcc

SEQ ID NO: 5088 - DNA, 20 bp, Artificial Sequence
  Synthetic: descartes_1001_CD1C
gagtaatcttgacttgcatg

SEQ ID NO: 5089 - DNA, 20 bp, Artificial Sequence
  Synthetic: descartes_1002_CD1D
cctcgtccacttgtcctggt

SEQ ID NO: 5090 - DNA, 20 bp, Artificial Sequence
  Synthetic: descartes_1003_CD1D
cccctccgctgcctccagat

SEQ ID NO: 5091 - DNA, 20 bp, Artificial Sequence
  Synthetic: descartes_1004_CD1D
cttgaaatgctacatggaag

SEQ ID NO: 5092 - DNA, 20 bp, Artificial Sequence
  Synthetic: descartes_1005_CD1D
ggtagaatcctgagacatgg

SEQ ID NO: 5093 - DNA, 20 bp, Artificial Sequence
  Synthetic: descartes_1006_CD1D
aaggaaaagatatcctgagt

SEQ ID NO: 5094 - DNA, 20 bp, Artificial Sequence
  Synthetic: descartes_1007_CD1D
caaggaacttcttgggagcc

SEQ ID NO: 5095 - DNA, 20 bp, Artificial Sequence
  Synthetic: descartes_1008_CD1D
cctcttaaaccgggaggtaa

SEQ ID NO: 5096 - DNA, 20 bp, Artificial Sequence
  Synthetic: descartes_1009_CD1D
ggtaaacttggccattcaag

SEQ ID NO: 5097 - DNA, 20 bp, Artificial Sequence
  Synthetic: descartes_1010_CD1E
accgtgagtcaactacaacc

SEQ ID NO: 5098 - DNA, 20 bp, Artificial Sequence
  Synthetic: descartes_1011_CD1E
cccaggacagcagagaccct

SEQ ID NO: 5099 - DNA, 20 bp, Artificial Sequence
  Synthetic: descartes_1012_CD1E
actgtgatagttaccctggt

SEQ ID NO: 5100 - DNA, 20 bp, Artificial Sequence
  Synthetic: descartes_1013_CD1E
catgggaccagggcttcaga

SEQ ID NO: 5101 - DNA, 20 bp, Artificial Sequence
  Synthetic: descartes_1014_CD1E
agttctgactcccctgcttc

SEQ ID NO: 5102 - DNA, 20 bp, Artificial Sequence
  Synthetic: descartes_1015_CD1E
ctgggagccatctccaggag

SEQ ID NO: 5103 - DNA, 20 bp, Artificial Sequence
  Synthetic: descartes_1016_CD1E
ggcgtgtcttccacttcttc

SEQ ID NO: 5104 - DNA, 20 bp, Artificial Sequence
  Synthetic: descartes_1017_CD1E
acccgacaggacaggccagc

SEQ ID NO: 5105 - DNA, 20 bp, Artificial Sequence
  Synthetic: descartes_1018_CD200
ggtgagacagagtcactgta

SEQ ID NO: 5106 - DNA, 20 bp, Artificial Sequence
  Synthetic: descartes_1019_CD200
gagtcccagctgggtaatgt

SEQ ID NO: 5107 - DNA, 20 bp, Artificial Sequence
  Synthetic: descartes_1020_CD200
agttccgctattgctaagca

SEQ ID NO: 5108 - DNA, 20 bp, Artificial Sequence
  Synthetic: descartes_1021_CD200
cagtacagtaagattgagat

SEQ ID NO: 5109 - DNA, 20 bp, Artificial Sequence
  Synthetic: descartes_1022_CD200
aggaagcaggtgtgtacagc

SEQ ID NO: 5110 - DNA, 20 bp, Artificial Sequence
  Synthetic: descartes_1023_CD200
ctaggagtgtagctgtaagg

SEQ ID NO: 5111 - DNA, 20 bp, Artificial Sequence
  Synthetic: descartes_1024_CD200
ggtggtcttcagagaatttg

SEQ ID NO: 5112 - DNA, 20 bp, Artificial Sequence
  Synthetic: descartes_1025_CD200
ggaagatctcaggaacggcc

SEQ ID NO: 5113 - DNA, 20 bp, Artificial Sequence
  Synthetic: descartes_1026_CD209
cttggaagaatgtccattcc

SEQ ID NO: 5114 - DNA, 20 bp, Artificial Sequence
  Synthetic: descartes_1027_CD209
tctggaagctcacccactgc

SEQ ID NO: 5115 - DNA, 20 bp, Artificial Sequence
  Synthetic: descartes_1028_CD209
tctgagagctcacccactgc

SEQ ID NO: 5116 - DNA, 20 bp, Artificial Sequence
  Synthetic: descartes_1029_CD209
gtggcaatggctggaacgac

SEQ ID NO: 5117 - DNA, 20 bp, Artificial Sequence
  Synthetic: descartes_1030_CD209
gatctgaaagtcccatccag

SEQ ID NO: 5118 - DNA, 20 bp, Artificial Sequence
  Synthetic: descartes_1031_CD209
gggtggcaggggctggagaa

SEQ ID NO: 5119 - DNA, 20 bp, Artificial Sequence
  Synthetic: descartes_1032_CD209
tccagcccctgccaccccaa

SEQ ID NO: 5120 - DNA, 20 bp, Artificial Sequence
  Synthetic: descartes_1033_CD209
agctgggtcaggttctggta

SEQ ID NO: 5121 - DNA, 20 bp, Artificial Sequence
  Synthetic: descartes_1034_CD226
acctccaagttcccaagaca

SEQ ID NO: 5122 - DNA, 20 bp, Artificial Sequence
  Synthetic: descartes_1035_CD226
atggcacagctgcctcaaaa

SEQ ID NO: 5123 - DNA, 20 bp, Artificial Sequence
  Synthetic: descartes_1036_CD226
ccgagaacatgtctctagaa

SEQ ID NO: 5124 - DNA, 20 bp, Artificial Sequence
  Synthetic: descartes_1037_CD226
cacttacccacagggaactt

SEQ ID NO: 5125 - DNA, 20 bp, Artificial Sequence
  Synthetic: descartes_1038_CD226
agccctactcatggcatggt

SEQ ID NO: 5126 - DNA, 20 bp, Artificial Sequence
  Synthetic: descartes_1039_CD226
cagagtcctgggatacacag

SEQ ID NO: 5127 - DNA, 20 bp, Artificial Sequence
  Synthetic: descartes_1040_CD226
ggaatgcctctgaagatgat

SEQ ID NO: 5128 - DNA, 20 bp, Artificial Sequence
  Synthetic: descartes_1041_CD226
aattcaacgatggcttccaa

SEQ ID NO: 5129 - DNA, 20 bp, Artificial Sequence
  Synthetic: descartes_1042_CD244
gttgtaactgaagaggcact

SEQ ID NO: 5130 - DNA, 20 bp, Artificial Sequence
  Synthetic: descartes_1043_CD244
ctggaggggggagcaccatc

SEQ ID NO: 5131 - DNA, 20 bp, Artificial Sequence
  Synthetic: descartes_1044_CD244
ccttccaatacttccaatga

SEQ ID NO: 5132 - DNA, 20 bp, Artificial Sequence
  Synthetic: descartes_1045_CD244
tagtcaagaacttgagtctt

SEQ ID NO: 5133 - DNA, 20 bp, Artificial Sequence
  Synthetic: descartes_1046_CD244
tgagggcagcaacttcttcc

SEQ ID NO: 5134 - DNA, 20 bp, Artificial Sequence
  Synthetic: descartes_1047_CD244
cgaagatgtcaaggatctga

SEQ ID NO: 5135 - DNA, 20 bp, Artificial Sequence
  Synthetic: descartes_1048_CD244
agatccttgacatcttcgta

SEQ ID NO: 5136 - DNA, 20 bp, Artificial Sequence
  Synthetic: descartes_1049_CD244
cagatatactggtgacctcc

SEQ ID NO: 5137 - DNA, 20 bp, Artificial Sequence
  Synthetic: descartes_1050_CD247
ggatccagcaggccaaagct

SEQ ID NO: 5138 - DNA, 20 bp, Artificial Sequence
  Synthetic: descartes_1051_CD247
accgcggccatcctgcaggc

SEQ ID NO: 5139 - DNA, 20 bp, Artificial Sequence
  Synthetic: descartes_1052_CD247
gcctgctggatcccaaactc

SEQ ID NO: 5140 - DNA, 20 bp, Artificial Sequence
  Synthetic: descartes_1053_CD247
atcccaatctcactgtaggc

SEQ ID NO: 5141 - DNA, 20 bp, Artificial Sequence
  Synthetic: descartes_1054_CD247
cccccatctcagggtcccgg

SEQ ID NO: 5142 - DNA, 20 bp, Artificial Sequence
  Synthetic: descartes_1055_CD247
gacaagagacgtggccggga

SEQ ID NO: 5143 - DNA, 20 bp, Artificial Sequence
  Synthetic: descartes_1056_CD27
cctgagcccagtagtgcctc

SEQ ID NO: 5144 - DNA, 20 bp, Artificial Sequence
  Synthetic: descartes_1057_CD27
gaagaggatcacactcggtg

SEQ ID NO: 5145 - DNA, 20 bp, Artificial Sequence
  Synthetic: descartes_1058_CD27
ggtaatcctcctggatgggg

SEQ ID NO: 5146 - DNA, 20 bp, Artificial Sequence
  Synthetic: descartes_1059_CD27
accctggccggggccctgtt

SEQ ID NO: 5147 - DNA, 20 bp, Artificial Sequence
  Synthetic: descartes_1060_CD27
ttcgcatccttgtgatcttc

SEQ ID NO: 5148 - DNA, 20 bp, Artificial Sequence
  Synthetic: descartes_1061_CD27
tatgctggtcacagtccttc

SEQ ID NO: 5149 - DNA, 20 bp, Artificial Sequence
  Synthetic: descartes_1062_CD27
cttcgttgatggaggaacag

SEQ ID NO: 5150 - DNA, 20 bp, Artificial Sequence
  Synthetic: descartes_1063_CD274
aatgtgaccagcacactgag

SEQ ID NO: 5151 - DNA, 20 bp, Artificial Sequence
  Synthetic: descartes_1064_CD274
ccagggagagctggtccttc

SEQ ID NO: 5152 - DNA, 20 bp, Artificial Sequence
  Synthetic: descartes_1065_CD274
gttgtggatccagtcacctc

SEQ ID NO: 5153 - DNA, 20 bp, Artificial Sequence
  Synthetic: descartes_1066_CD274
ctcaggatctaatctcctaa

SEQ ID NO: 5154 - DNA, 20 bp, Artificial Sequence
  Synthetic: descartes_1067_CD274
ggagattagatcctgaggaa

SEQ ID NO: 5155 - DNA, 20 bp, Artificial Sequence
  Synthetic: descartes_1068_CD274
acatctgtgatctgaagtgc

SEQ ID NO: 5156 - DNA, 20 bp, Artificial Sequence
  Synthetic: descartes_1069_CD274
ctgtcacggttcccaaggac

SEQ ID NO: 5157 - DNA, 20 bp, Artificial Sequence
  Synthetic: descartes_1070_CD274
ccaatagacaattagtgcag

SEQ ID NO: 5158 - DNA, 20 bp, Artificial Sequence
  Synthetic: descartes_1071_CD276
gtatctgtcagctgccagat

SEQ ID NO: 5159 - DNA, 20 bp, Artificial Sequence
  Synthetic: descartes_1072_CD276
gtgtctgtcagctgccagat

SEQ ID NO: 5160 - DNA, 20 bp, Artificial Sequence
  Synthetic: descartes_1073_CD276
gtgtgctggagaaagatcaa

SEQ ID NO: 5161 - DNA, 20 bp, Artificial Sequence
  Synthetic: descartes_1074_CD276
accgaaggccgggaccaggg

SEQ ID NO: 5162 - DNA, 20 bp, Artificial Sequence
  Synthetic: descartes_1075_CD276
cacccagcaccacccgcagg

SEQ ID NO: 5163 - DNA, 20 bp, Artificial Sequence
  Synthetic: descartes_1076_CD276
atgtgcacagcatcctgcgg

SEQ ID NO: 5164 - DNA, 20 bp, Artificial Sequence
  Synthetic: descartes_1077_CD276
ggcagcgctgccgtcagcct

SEQ ID NO: 5165 - DNA, 20 bp, Artificial Sequence
  Synthetic: descartes_1078_CD276
atctttctccagcacacgaa

SEQ ID NO: 5166 - DNA, 20 bp, Artificial Sequence
  Synthetic: descartes_1079_CD28
gtgaagcagtcgcccatgct

SEQ ID NO: 5167 - DNA, 20 bp, Artificial Sequence
  Synthetic: descartes_1080_CD28
ccatcacagttgaaccccgt

SEQ ID NO: 5168 - DNA, 20 bp, Artificial Sequence
  Synthetic: descartes_1081_CD28
tatgttaaccaaacagatat

SEQ ID NO: 5169 - DNA, 20 bp, Artificial Sequence
  Synthetic: descartes_1082_CD28
agtaaacctgaagctgctgg

SEQ ID NO: 5170 - DNA, 20 bp, Artificial Sequence
  Synthetic: descartes_1083_CD28
gttaacatacaaattctgga

SEQ ID NO: 5171 - DNA, 20 bp, Artificial Sequence
  Synthetic: descartes_1084_CD28
acatggataatggttccatt

SEQ ID NO: 5172 - DNA, 20 bp, Artificial Sequence
  Synthetic: descartes_1085_CD28
ccggaccttctaagcccttt

SEQ ID NO: 5173 - DNA, 20 bp, Artificial Sequence
  Synthetic: descartes_1086_CD28
ctcaaaaacggggttcaact

SEQ ID NO: 5174 - DNA, 20 bp, Artificial Sequence
  Synthetic: descartes_1087_CD300A
ctatgtgacaagattgtgga

SEQ ID NO: 5175 - DNA, 20 bp, Artificial Sequence
  Synthetic: descartes_1088_CD300A
ctgctgaccctttggtctcc

SEQ ID NO: 5176 - DNA, 20 bp, Artificial Sequence
  Synthetic: descartes_1089_CD300A
cacctgtatcatccactacc

SEQ ID NO: 5177 - DNA, 20 bp, Artificial Sequence
  Synthetic: descartes_1090_CD300A
ctgcagaggccacatcagca

SEQ ID NO: 5178 - DNA, 20 bp, Artificial Sequence
  Synthetic: descartes_1091_CD300A
attctaacaccaacaggata

SEQ ID NO: 5179 - DNA, 20 bp, Artificial Sequence
  Synthetic: descartes_1092_CD300A
gtctccacaatcttgtcaca

SEQ ID NO: 5180 - DNA, 20 bp, Artificial Sequence
  Synthetic: descartes_1093_CD300A
ctcctggatgctggcactgt

SEQ ID NO: 5181 - DNA, 20 bp, Artificial Sequence
  Synthetic: descartes_1094_CD300A
cgtagtgcagctcactctgc

SEQ ID NO: 5182 - DNA, 20 bp, Artificial Sequence
  Synthetic: descartes_1095_CD3D
ccaggtccagtcttgtaatg

SEQ ID NO: 5183 - DNA, 20 bp, Artificial Sequence
  Synthetic: descartes_1096_CD3D
ctccaaggtggctgtactga

SEQ ID NO: 5184 - DNA, 20 bp, Artificial Sequence
  Synthetic: descartes_1097_CD3D
tctctggcctggtactggct

SEQ ID NO: 5185 - DNA, 20 bp, Artificial Sequence
  Synthetic: descartes_1098_CD3D
tccttgtatatatctgtccc

SEQ ID NO: 5186 - DNA, 20 bp, Artificial Sequence
  Synthetic: descartes_1099_CD3D
tgaattgcaataccagcatc

SEQ ID NO: 5187 - DNA, 20 bp, Artificial Sequence
  Synthetic: descartes_1100_CD3D
ggagtcttctgctttgctgg

SEQ ID NO: 5188 - DNA, 20 bp, Artificial Sequence
  Synthetic: descartes_1101_CD3D
ctggacatgagactggaagg

SEQ ID NO: 5189 - DNA, 20 bp, Artificial Sequence
  Synthetic: descartes_1102_CD3E
ctactggagcaagaatagaa

SEQ ID NO: 5190 - DNA, 20 bp, Artificial Sequence
  Synthetic: descartes_1103_CD3E
agaattggagcaaagtggtt

SEQ ID NO: 5191 - DNA, 20 bp, Artificial Sequence
  Synthetic: descartes_1104_CD3E
cttcctctggggtagcagac

SEQ ID NO: 5192 - DNA, 20 bp, Artificial Sequence
  Synthetic: descartes_1105_CD3E
tcatcctcatcaccgcctat

SEQ ID NO: 5193 - DNA, 20 bp, Artificial Sequence
  Synthetic: descartes_1106_CD3E
agatccaggatactgagggc

SEQ ID NO: 5194 - DNA, 20 bp, Artificial Sequence
  Synthetic: descartes_1107_CD3E
cctgccgccagcacccgctc

SEQ ID NO: 5195 - DNA, 20 bp, Artificial Sequence
  Synthetic: descartes_1108_CD3E
tcattgtgttgccatagtat

SEQ ID NO: 5196 - DNA, 20 bp, Artificial Sequence
  Synthetic: descartes_1109_CD3E
ctccaattctgaaaattcct

SEQ ID NO: 5197 - DNA, 20 bp, Artificial Sequence
  Synthetic: descartes_1110_CD3G
gcttctgcatcacaagtcag

SEQ ID NO: 5198 - DNA, 20 bp, Artificial Sequence
  Synthetic: descartes_1111_CD3G
agcaaagagaaagccagata

SEQ ID NO: 5199 - DNA, 20 bp, Artificial Sequence
  Synthetic: descartes_1112_CD3G
aagatgggaagatgatcggc

SEQ ID NO: 5200 - DNA, 20 bp, Artificial Sequence
  Synthetic: descartes_1113_CD3G
cttgaaggtggctgtactgg

SEQ ID NO: 5201 - DNA, 20 bp, Artificial Sequence
  Synthetic: descartes_1114_CD3G
gtccttgctgttggggtcta

SEQ ID NO: 5202 - DNA, 20 bp, Artificial Sequence
  Synthetic: descartes_1115_CD3G
tcttcagttaggaagccgat

SEQ ID NO: 5203 - DNA, 20 bp, Artificial Sequence
  Synthetic: descartes_1116_CD3G
cactgatacatccctcgagg

SEQ ID NO: 5204 - DNA, 20 bp, Artificial Sequence
  Synthetic: descartes_1117_CD3G
acttgttctgtgatccttta

SEQ ID NO: 5205 - DNA, 20 bp, Artificial Sequence
  Synthetic: descartes_1118_CD4
agaagacatgtagccccatt

SEQ ID NO: 5206 - DNA, 20 bp, Artificial Sequence
  Synthetic: descartes_1119_CD4
ccctgatcatcaagaatctt

SEQ ID NO: 5207 - DNA, 20 bp, Artificial Sequence
  Synthetic: descartes_1120_CD4
cagagccagcatactgaggc

SEQ ID NO: 5208 - DNA, 20 bp, Artificial Sequence
  Synthetic: descartes_1121_CD4
ccccttggactcctacattg

SEQ ID NO: 5209 - DNA, 20 bp, Artificial Sequence
  Synthetic: descartes_1122_CD4
cttggtcccaaaggcttctt

SEQ ID NO: 5210 - DNA, 20 bp, Artificial Sequence
  Synthetic: descartes_1123_CD4
cagtggaattgtatgctctt

SEQ ID NO: 5211 - DNA, 20 bp, Artificial Sequence
  Synthetic: descartes_1124_CD4
cagacacttccttgttcttc

SEQ ID NO: 5212 - DNA, 20 bp, Artificial Sequence
  Synthetic: descartes_1125_CD4
attgggctaggcatcttctt

SEQ ID NO: 5213 - DNA, 20 bp, Artificial Sequence
  Synthetic: descartes_1126_CD40
agtgaactctgtgcagtcac

SEQ ID NO: 5214 - DNA, 20 bp, Artificial Sequence
  Synthetic: descartes_1127_CD40
catggatgccaaccggtcac

SEQ ID NO: 5215 - DNA, 20 bp, Artificial Sequence
  Synthetic: descartes_1128_CD40
ccgacgatcttcctggctcc

SEQ ID NO: 5216 - DNA, 20 bp, Artificial Sequence
  Synthetic: descartes_1129_CD40
tgaggtgcccttctgctgga

SEQ ID NO: 5217 - DNA, 20 bp, Artificial Sequence
  Synthetic: descartes_1130_CD40
gaaagcagatgacacattgg

SEQ ID NO: 5218 - DNA, 20 bp, Artificial Sequence
  Synthetic: descartes_1131_CD40
tgataccatctgcgagccct

SEQ ID NO: 5219 - DNA, 20 bp, Artificial Sequence
  Synthetic: descartes_1132_CD40
accgcaaggaaggcattccg

SEQ ID NO: 5220 - DNA, 20 bp, Artificial Sequence
  Synthetic: descartes_1133_CD40
tgcctgcctgttgcacaacc

SEQ ID NO: 5221 - DNA, 20 bp, Artificial Sequence
  Synthetic: descartes_1134_CD40LG
atgaatacaaaatcttcatg

SEQ ID NO: 5222 - DNA, 20 bp, Artificial Sequence
  Synthetic: descartes_1135_CD40LG
ctgctggcctcacttatgac

SEQ ID NO: 5223 - DNA, 20 bp, Artificial Sequence
  Synthetic: descartes_1136_CD40LG
ggcagaggctggctataaat

SEQ ID NO: 5224 - DNA, 20 bp, Artificial Sequence
  Synthetic: descartes_1137_CD40LG
agtaagccaaaggacgtgaa

SEQ ID NO: 5225 - DNA, 20 bp, Artificial Sequence
  Synthetic: descartes_1138_CD40LG
tagccagcctctgcctaaag

SEQ ID NO: 5226 - DNA, 20 bp, Artificial Sequence
  Synthetic: descartes_1139_CD40LG
cagggttaccaagttgttgc

SEQ ID NO: 5227 - DNA, 20 bp, Artificial Sequence
  Synthetic: descartes_1140_CD40LG
atctcctcacagttcagtaa

SEQ ID NO: 5228 - DNA, 20 bp, Artificial Sequence
  Synthetic: descartes_1141_CD40LG
tattcatgaaaacgatacag

SEQ ID NO: 5229 - DNA, 20 bp, Artificial Sequence
  Synthetic: descartes_1142_CD46
tgtacaccacctccaaaaat

SEQ ID NO: 5230 - DNA, 20 bp, Artificial Sequence
  Synthetic: descartes_1143_CD46
tgttgtcccgtacagatatc

SEQ ID NO: 5231 - DNA, 20 bp, Artificial Sequence
  Synthetic: descartes_1144_CD46
ctacaaagcaacagttatgt

SEQ ID NO: 5232 - DNA, 20 bp, Artificial Sequence
  Synthetic: descartes_1145_CD46
aaggatcccgtatatatgga

SEQ ID NO: 5233 - DNA, 20 bp, Artificial Sequence
  Synthetic: descartes_1146_CD46
cctcgatggcagcgacacaa

SEQ ID NO: 5234 - DNA, 20 bp, Artificial Sequence
  Synthetic: descartes_1147_CD46
gtctggtaagtggcatattc

SEQ ID NO: 5235 - DNA, 20 bp, Artificial Sequence
  Synthetic: descartes_1148_CD46
ccaatgagctccatagcttc

SEQ ID NO: 5236 - DNA, 20 bp, Artificial Sequence
  Synthetic: descartes_1149_CD46
cacttataatctactcgttc

SEQ ID NO: 5237 - DNA, 20 bp, Artificial Sequence
  Synthetic: descartes_1150_CD48
agataacagttgtcatccat

SEQ ID NO: 5238 - DNA, 20 bp, Artificial Sequence
  Synthetic: descartes_1151_CD48
tggaatcccattctacaatc

SEQ ID NO: 5239 - DNA, 20 bp, Artificial Sequence
  Synthetic: descartes_1152_CD48
tccccataccaggtgtagtt

SEQ ID NO: 5240 - DNA, 20 bp, Artificial Sequence
  Synthetic: descartes_1153_CD48
aaggcagggtcagacttgat

SEQ ID NO: 5241 - DNA, 20 bp, Artificial Sequence
  Synthetic: descartes_1154_CD48
cagactcgccaggtatcaca

SEQ ID NO: 5242 - DNA, 20 bp, Artificial Sequence
  Synthetic: descartes_1155_CD48
gattcaaagtacttagattt

SEQ ID NO: 5243 - DNA, 20 bp, Artificial Sequence
  Synthetic: descartes_1156_CD48
aagcacactgttctggagct

SEQ ID NO: 5244 - DNA, 20 bp, Artificial Sequence
  Synthetic: descartes_1157_CD48
aacaccctcatgatgtaggt

SEQ ID NO: 5245 - DNA, 20 bp, Artificial Sequence
  Synthetic: descartes_1158_CD5
ggagagaaattcctactgca

SEQ ID NO: 5246 - DNA, 20 bp, Artificial Sequence
  Synthetic: descartes_1159_CD5
caggcaaggctcacccgttc

SEQ ID NO: 5247 - DNA, 20 bp, Artificial Sequence
  Synthetic: descartes_1160_CD5
ctgaagcaatgctccaggga

SEQ ID NO: 5248 - DNA, 20 bp, Artificial Sequence
  Synthetic: descartes_1161_CD5
catcgcaaccacacggcaac

SEQ ID NO: 5249 - DNA, 20 bp, Artificial Sequence
  Synthetic: descartes_1162_CD5
tctcccaaagttcgtggcac

SEQ ID NO: 5250 - DNA, 20 bp, Artificial Sequence
  Synthetic: descartes_1163_CD5
gttcattcccgttgggccaa

SEQ ID NO: 5251 - DNA, 20 bp, Artificial Sequence
  Synthetic: descartes_1164_CD5
tgctgtggctgcagttggag

SEQ ID NO: 5252 - DNA, 20 bp, Artificial Sequence
  Synthetic: descartes_1165_CD5
cagcccaaggtgcagagccg

SEQ ID NO: 5253 - DNA, 20 bp, Artificial Sequence
  Synthetic: descartes_1166_CD55
ccgaggatactgtaataacg

SEQ ID NO: 5254 - DNA, 20 bp, Artificial Sequence
  Synthetic: descartes_1167_CD55
atgaaacaaccccaaataaa

SEQ ID NO: 5255 - DNA, 20 bp, Artificial Sequence
  Synthetic: descartes_1168_CD55
gtgatagagaaggttctctt

SEQ ID NO: 5256 - DNA, 20 bp, Artificial Sequence
  Synthetic: descartes_1169_CD55
gtgcaaccatctccttctca

SEQ ID NO: 5257 - DNA, 20 bp, Artificial Sequence
  Synthetic: descartes_1170_CD55
tgagaagttggtgagacttc

SEQ ID NO: 5258 - DNA, 20 bp, Artificial Sequence
  Synthetic: descartes_1171_CD55
ggaggccggaaaaatcgctt

SEQ ID NO: 5259 - DNA, 20 bp, Artificial Sequence
  Synthetic: descartes_1172_CD55
aaatggtccacagcagtcga

SEQ ID NO: 5260 - DNA, 20 bp, Artificial Sequence
  Synthetic: descartes_1173_CD55
cagtcggtactgttgtggaa

SEQ ID NO: 5261 - DNA, 20 bp, Artificial Sequence
  Synthetic: descartes_1174_CD6
atgctgcccatccaggtcca

SEQ ID NO: 5262 - DNA, 20 bp, Artificial Sequence
  Synthetic: descartes_1175_CD6
ggggctgctccaggaaggaa

SEQ ID NO: 5263 - DNA, 20 bp, Artificial Sequence
  Synthetic: descartes_1176_CD6
ggactattgcagtaatcctc

SEQ ID NO: 5264 - DNA, 20 bp, Artificial Sequence
  Synthetic: descartes_1177_CD6
ttcagagaggagttccttcc

SEQ ID NO: 5265 - DNA, 20 bp, Artificial Sequence
  Synthetic: descartes_1178_CD6
ctggacctcctcatctgtga

SEQ ID NO: 5266 - DNA, 20 bp, Artificial Sequence
  Synthetic: descartes_1179_CD6
tcagacggaccggaagccgc

SEQ ID NO: 5267 - DNA, 20 bp, Artificial Sequence
  Synthetic: descartes_1180_CD6
cacaatctgtccactcccga

SEQ ID NO: 5268 - DNA, 20 bp, Artificial Sequence
  Synthetic: descartes_1181_CD6
attctcaagaggatgaaggc

SEQ ID NO: 5269 - DNA, 20 bp, Artificial Sequence
  Synthetic: descartes_1182_CD74
aaacaggagccaatggtgca

SEQ ID NO: 5270 - DNA, 20 bp, Artificial Sequence
  Synthetic: descartes_1183_CD74
ctccaaggagtgcctgctca

SEQ ID NO: 5271 - DNA, 20 bp, Artificial Sequence
  Synthetic: descartes_1184_CD74
ggtggagcgtcagtgggctt

SEQ ID NO: 5272 - DNA, 20 bp, Artificial Sequence
  Synthetic: descartes_1185_CD74
catcctggtgactctgctcc

SEQ ID NO: 5273 - DNA, 20 bp, Artificial Sequence
  Synthetic: descartes_1186_CD74
aaatgagcaggcactccttg

SEQ ID NO: 5274 - DNA, 20 bp, Artificial Sequence
  Synthetic: descartes_1187_CD74
tccagccggccctgctgctg

SEQ ID NO: 5275 - DNA, 20 bp, Artificial Sequence
  Synthetic: descartes_1188_CD74
agagctggatgcaccattgg

SEQ ID NO: 5276 - DNA, 20 bp, Artificial Sequence
  Synthetic: descartes_1189_CD79B
accgtgaagccccgtttcct

SEQ ID NO: 5277 - DNA, 20 bp, Artificial Sequence
  Synthetic: descartes_1190_CD79B
aggacaatggcatctacttc

SEQ ID NO: 5278 - DNA, 20 bp, Artificial Sequence
  Synthetic: descartes_1191_CD79B
atagccaggaaacggggctt

SEQ ID NO: 5279 - DNA, 20 bp, Artificial Sequence
  Synthetic: descartes_1192_CD79B
ggattccggtaccggtcctc

SEQ ID NO: 5280 - DNA, 20 bp, Artificial Sequence
  Synthetic: descartes_1193_CD79B
ctggctatgaaacgtgggct

SEQ ID NO: 5281 - DNA, 20 bp, Artificial Sequence
  Synthetic: descartes_1194_CD79B
cagcttcagctgctggggat

SEQ ID NO: 5282 - DNA, 20 bp, Artificial Sequence
  Synthetic: descartes_1195_CD80
ctgataacctgctcccatcc

SEQ ID NO: 5283 - DNA, 20 bp, Artificial Sequence
  Synthetic: descartes_1196_CD80
aatatgacaaccaaccacag

SEQ ID NO: 5284 - DNA, 20 bp, Artificial Sequence
  Synthetic: descartes_1197_CD80
ccaagatcctgaaactgagc

SEQ ID NO: 5285 - DNA, 20 bp, Artificial Sequence
  Synthetic: descartes_1198_CD80
ctgctaacagcatagagctc

SEQ ID NO: 5286 - DNA, 20 bp, Artificial Sequence
  Synthetic: descartes_1199_CD80
atacttcagaacaacacact

SEQ ID NO: 5287 - DNA, 20 bp, Artificial Sequence
  Synthetic: descartes_1200_CD80
agagtgaatcagaccttcaa

SEQ ID NO: 5288 - DNA, 20 bp, Artificial Sequence
  Synthetic: descartes_1201_CD80
ccttctcaatctctcattcc

SEQ ID NO: 5289 - DNA, 20 bp, Artificial Sequence
  Synthetic: descartes_1202_CD80
ccccaagatgcagagagaga

SEQ ID NO: 5290 - DNA, 20 bp, Artificial Sequence
  Synthetic: descartes_1203_CD84
cctgtaaatatccaagaacc

SEQ ID NO: 5291 - DNA, 20 bp, Artificial Sequence
  Synthetic: descartes_1204_CD84
cagggaaagtgactgactct

SEQ ID NO: 5292 - DNA, 20 bp, Artificial Sequence
  Synthetic: descartes_1205_CD84
caggcaaaggagcaagatcc

SEQ ID NO: 5293 - DNA, 20 bp, Artificial Sequence
  Synthetic: descartes_1206_CD84
tgagtctcctggtgttacat

SEQ ID NO: 5294 - DNA, 20 bp, Artificial Sequence
  Synthetic: descartes_1207_CD84
tgtgggtcacagtaactacg

SEQ ID NO: 5295 - DNA, 20 bp, Artificial Sequence
  Synthetic: descartes_1208_CD84
atggcatctgtgaacagcac

SEQ ID NO: 5296 - DNA, 20 bp, Artificial Sequence
  Synthetic: descartes_1209_CD84
gaagtccaagcaatgatttt

SEQ ID NO: 5297 - DNA, 20 bp, Artificial Sequence
  Synthetic: descartes_1210_CD84
aaggacattaccctcttctc

SEQ ID NO: 5298 - DNA, 20 bp, Artificial Sequence
  Synthetic: descartes_1211_CD86
gcaggaccaggaaaacttgg

SEQ ID NO: 5299 - DNA, 20 bp, Artificial Sequence
  Synthetic: descartes_1212_CD86
catagaattagacagaaaac

SEQ ID NO: 5300 - DNA, 20 bp, Artificial Sequence
  Synthetic: descartes_1213_CD86
tgcataacaccatcatactc

SEQ ID NO: 5301 - DNA, 20 bp, Artificial Sequence
  Synthetic: descartes_1214_CD86
aatgagactgcagacctgcc

SEQ ID NO: 5302 - DNA, 20 bp, Artificial Sequence
  Synthetic: descartes_1215_CD86
ctaagaaccaagaattcaac

SEQ ID NO: 5303 - DNA, 20 bp, Artificial Sequence
  Synthetic: descartes_1216_CD86
ctggtcctgccaaaatacta

SEQ ID NO: 5304 - DNA, 20 bp, Artificial Sequence
  Synthetic: descartes_1217_CD86
cagaatacagaagatggtca

SEQ ID NO: 5305 - DNA, 20 bp, Artificial Sequence
  Synthetic: descartes_1218_CD86
tgatggatgatacattgata

SEQ ID NO: 5306 - DNA, 20 bp, Artificial Sequence
  Synthetic: descartes_1219_CD8B
cctgggagtggccatccacc

SEQ ID NO: 5307 - DNA, 20 bp, Artificial Sequence
  Synthetic: descartes_1220_CD8B
gcctcgcaggacagcatcac

SEQ ID NO: 5308 - DNA, 20 bp, Artificial Sequence
  Synthetic: descartes_1221_CD8B
cttcccaccactgcccagcc

SEQ ID NO: 5309 - DNA, 20 bp, Artificial Sequence
  Synthetic: descartes_1222_CD8B
gggatgcaagccggttcatt

SEQ ID NO: 5310 - DNA, 20 bp, Artificial Sequence
  Synthetic: descartes_1223_CD8B
atgaaacgaagccgggctct

SEQ ID NO: 5311 - DNA, 20 bp, Artificial Sequence
  Synthetic: descartes_1224_CD8B
aggatccatgggttaagcag

SEQ ID NO: 5312 - DNA, 20 bp, Artificial Sequence
  Synthetic: descartes_1225_CD8B
cggaatcccagagggccagg

SEQ ID NO: 5313 - DNA, 20 bp, Artificial Sequence
  Synthetic: descartes_1226_CD8B
tcccccaatgcctgcatgga

SEQ ID NO: 5314 - DNA, 20 bp, Artificial Sequence
  Synthetic: descartes_1227_CD9
caaggacacctacaacaagc

SEQ ID NO: 5315 - DNA, 20 bp, Artificial Sequence
  Synthetic: descartes_1228_CD9
gctgggggcgtggaacagtt

SEQ ID NO: 5316 - DNA, 20 bp, Artificial Sequence
  Synthetic: descartes_1229_CD9
aatggcgaatatcaccaaga

SEQ ID NO: 5317 - DNA, 20 bp, Artificial Sequence
  Synthetic: descartes_1230_CD9
gcatgatcttcagtatgatc

SEQ ID NO: 5318 - DNA, 20 bp, Artificial Sequence
  Synthetic: descartes_1231_CD9
tctcagacatctgccccaag

SEQ ID NO: 5319 - DNA, 20 bp, Artificial Sequence
  Synthetic: descartes_1232_CD9
agcttgttgtaggtgtcctt

SEQ ID NO: 5320 - DNA, 20 bp, Artificial Sequence
  Synthetic: descartes_1233_CD9
gagtacgtccttcttggggc

SEQ ID NO: 5321 - DNA, 20 bp, Artificial Sequence
  Synthetic: descartes_1234_CD9
ccgctggggctcatccttgg

SEQ ID NO: 5322 - DNA, 20 bp, Artificial Sequence
  Synthetic: descartes_1235_CDC42
ccaacagcaccatcgcccac

SEQ ID NO: 5323 - DNA, 20 bp, Artificial Sequence
  Synthetic: descartes_1236_CDC42
agtggtctctccatcttcat

SEQ ID NO: 5324 - DNA, 20 bp, Artificial Sequence
  Synthetic: descartes_1237_CDC42
agtcccaacaagcaagaaag

SEQ ID NO: 5325 - DNA, 20 bp, Artificial Sequence
  Synthetic: descartes_1238_CDC42
aaatgaagatggagagacca

SEQ ID NO: 5326 - DNA, 20 bp, Artificial Sequence
  Synthetic: descartes_1239_CDC42
atgaggctatcctagctgcc

SEQ ID NO: 5327 - DNA, 20 bp, Artificial Sequence
  Synthetic: descartes_1240_CDC42
tggataactcagcggtcgta

SEQ ID NO: 5328 - DNA, 20 bp, Artificial Sequence
  Synthetic: descartes_1241_CDC42
tcaatagtagaggggtcatc

SEQ ID NO: 5329 - DNA, 20 bp, Artificial Sequence
  Synthetic: descartes_1242_CDC42
acaactatgcagtcacagtt

SEQ ID NO: 5330 - DNA, 20 bp, Artificial Sequence
  Synthetic: descartes_1243_CDH4
gtgtagagggactcacggtc

SEQ ID NO: 5331 - DNA, 20 bp, Artificial Sequence
  Synthetic: descartes_1244_CDH4
ggagattaatgccgtgtaat

SEQ ID NO: 5332 - DNA, 20 bp, Artificial Sequence
  Synthetic: descartes_1245_CDH4
aggggaagtagggagcctcg

SEQ ID NO: 5333 - DNA, 20 bp, Artificial Sequence
  Synthetic: descartes_1246_CDH4
agctgtggaccctgaccggt

SEQ ID NO: 5334 - DNA, 20 bp, Artificial Sequence
  Synthetic: descartes_1247_CDH4
tctgctgtctggctgtccca

SEQ ID NO: 5335 - DNA, 20 bp, Artificial Sequence
  Synthetic: descartes_1248_CDH4
atgctgacagtgatggtgtc

SEQ ID NO: 5336 - DNA, 20 bp, Artificial Sequence
  Synthetic: descartes_1249_CDH4
aagtccatgctgttggtctc

SEQ ID NO: 5337 - DNA, 20 bp, Artificial Sequence
  Synthetic: descartes_1250_CDH4
cttggcacgtgccccatggc

SEQ ID NO: 5338 - DNA, 20 bp, Artificial Sequence
  Synthetic: descartes_1251_CDY1
attagcccacacgagatcac

SEQ ID NO: 5339 - DNA, 20 bp, Artificial Sequence
  Synthetic: descartes_1252_CDY1
atagacgacagactgaaaaa

SEQ ID NO: 5340 - DNA, 20 bp, Artificial Sequence
  Synthetic: descartes_1253_CDY1
ccttctgtcaccttgaagac

SEQ ID NO: 5341 - DNA, 20 bp, Artificial Sequence
  Synthetic: descartes_1254_CDY1
actggaactttcacccaaga

SEQ ID NO: 5342 - DNA, 20 bp, Artificial Sequence
  Synthetic: descartes_1255_CDY1
aattgaataaaagtattcac

SEQ ID NO: 5343 - DNA, 20 bp, Artificial Sequence
  Synthetic: descartes_1256_CDY1
aaacaatgccagaagaagaa

SEQ ID NO: 5344 - DNA, 20 bp, Artificial Sequence
  Synthetic: descartes_1257_CDY1
ggagagttcttagaatagtt

SEQ ID NO: 5345 - DNA, 20 bp, Artificial Sequence
  Synthetic: descartes_1258_CDY1
gggaatgtaatagaagaaca

SEQ ID NO: 5346 - DNA, 20 bp, Artificial Sequence
  Synthetic: descartes_1259_CDY2A
attagcccacacgagatcac

SEQ ID NO: 5347 - DNA, 20 bp, Artificial Sequence
  Synthetic: descartes_1260_CDY2A
atagacgacagactgaaaaa

SEQ ID NO: 5348 - DNA, 20 bp, Artificial Sequence
  Synthetic: descartes_1261_CDY2A
ccttctgtcaccttgaagac

SEQ ID NO: 5349 - DNA, 20 bp, Artificial Sequence
  Synthetic: descartes_1262_CDY2A
actggaactttcacccaaga

SEQ ID NO: 5350 - DNA, 20 bp, Artificial Sequence
  Synthetic: descartes_1263_CDY2A
aattgaataaaagtattcac

SEQ ID NO: 5351 - DNA, 20 bp, Artificial Sequence
  Synthetic: descartes_1264_CDY2A
aaacaatgccagaagaagaa

SEQ ID NO: 5352 - DNA, 20 bp, Artificial Sequence
  Synthetic: descartes_1265_CDY2A
ggagagttcttagaatagtt

SEQ ID NO: 5353 - DNA, 20 bp, Artificial Sequence
  Synthetic: descartes_1266_CDY2A
gggaatgtaatagaagaaca

SEQ ID NO: 5354 - DNA, 20 bp, Artificial Sequence
  Synthetic: descartes_1267_CDYL
attagcccaaaccacatcgc

SEQ ID NO: 5355 - DNA, 20 bp, Artificial Sequence
  Synthetic: descartes_1268_CDYL
ctggcagtcactcctgtaac

SEQ ID NO: 5356 - DNA, 20 bp, Artificial Sequence
  Synthetic: descartes_1269_CDYL
aaacaccctataccaccttc

SEQ ID NO: 5357 - DNA, 20 bp, Artificial Sequence
  Synthetic: descartes_1270_CDYL
cctcacgctgaaacgcaatc

SEQ ID NO: 5358 - DNA, 20 bp, Artificial Sequence
  Synthetic: descartes_1271_CDYL
ctgtcatctgtcagacgtcg

SEQ ID NO: 5359 - DNA, 20 bp, Artificial Sequence
  Synthetic: descartes_1272_CDYL
gcccgggacgttcactcagg

SEQ ID NO: 5360 - DNA, 20 bp, Artificial Sequence
  Synthetic: descartes_1273_CDYL
tacgacgtctgacagatgac

SEQ ID NO: 5361 - DNA, 20 bp, Artificial Sequence
  Synthetic: descartes_1274_CDYL
ggctaatgaaaaggcttggt

SEQ ID NO: 5362 - DNA, 20 bp, Artificial Sequence
  Synthetic: descartes_1275_CDYL2
agctacctgcaggacaaaat

SEQ ID NO: 5363 - DNA, 20 bp, Artificial Sequence
  Synthetic: descartes_1276_CDYL2
gcttggccaggggagggtta

SEQ ID NO: 5364 - DNA, 20 bp, Artificial Sequence
  Synthetic: descartes_1277_CDYL2
tgggaggtccccttgctctt

SEQ ID NO: 5365 - DNA, 20 bp, Artificial Sequence
  Synthetic: descartes_1278_CDYL2
attctggcggacactgtatc

SEQ ID NO: 5366 - DNA, 20 bp, Artificial Sequence
  Synthetic: descartes_1279_CDYL2
aatgatcatgttggagagca

SEQ ID NO: 5367 - DNA, 20 bp, Artificial Sequence
  Synthetic: descartes_1280_CDYL2
caaagtgcctctcatccttc

SEQ ID NO: 5368 - DNA, 20 bp, Artificial Sequence
  Synthetic: descartes_1281_CDYL2
gaggagctccagagctgctt

SEQ ID NO: 5369 - DNA, 20 bp, Artificial Sequence
  Synthetic: descartes_1282_CDYL2
agaagcctatcgtggtggcc

SEQ ID NO: 5370 - DNA, 20 bp, Artificial Sequence
  Synthetic: descartes_1283_CEACAM1
gctacagctggtacaaaggg

SEQ ID NO: 5371 - DNA, 20 bp, Artificial Sequence
  Synthetic: descartes_1284_CEACAM1
cccttcagacacctattacc

SEQ ID NO: 5372 - DNA, 20 bp, Artificial Sequence
  Synthetic: descartes_1285_CEACAM1
tccctaacatcactgtgaat

SEQ ID NO: 5373 - DNA, 20 bp, Artificial Sequence
  Synthetic: descartes_1286_CEACAM1
acggttgccatccactcttt

SEQ ID NO: 5374 - DNA, 20 bp, Artificial Sequence
  Synthetic: descartes_1287_CEACAM1
aagaaccaacggatggagat

SEQ ID NO: 5375 - DNA, 20 bp, Artificial Sequence
  Synthetic: descartes_1288_CEACAM1
tccaccacaggtaggttgtg

SEQ ID NO: 5376 - DNA, 20 bp, Artificial Sequence
  Synthetic: descartes_1289_CEACAM1
cccctggacggtaataggtg

SEQ ID NO: 5377 - DNA, 20 bp, Artificial Sequence
  Synthetic: descartes_1290_CEACAM1
aagcccagcaacccacacaa

SEQ ID NO: 5378 - DNA, 20 bp, Artificial Sequence
  Synthetic: descartes_1291_CECR2
gcgagaggacctcccttcga

SEQ ID NO: 5379 - DNA, 20 bp, Artificial Sequence
  Synthetic: descartes_1292_CECR2
gacctggacaaccataacgc

SEQ ID NO: 5380 - DNA, 20 bp, Artificial Sequence
  Synthetic: descartes_1293_CECR2
ctggagaagatggagacaca

SEQ ID NO: 5381 - DNA, 20 bp, Artificial Sequence
  Synthetic: descartes_1294_CECR2
tgactggcagagacctctcc

SEQ ID NO: 5382 - DNA, 20 bp, Artificial Sequence
  Synthetic: descartes_1295_CECR2
agtctaaccacccacattct

SEQ ID NO: 5383 - DNA, 20 bp, Artificial Sequence
  Synthetic: descartes_1296_CECR2
ccccaaggggctttcagtct

SEQ ID NO: 5384 - DNA, 20 bp, Artificial Sequence
  Synthetic: descartes_1297_CECR2
ggaaccactgctaccaaggc

SEQ ID NO: 5385 - DNA, 20 bp, Artificial Sequence
  Synthetic: descartes_1298_CECR2
cttgcaccgggtcctctttg

SEQ ID NO: 5386 - DNA, 20 bp, Artificial Sequence
  Synthetic: descartes_1299_CFI
cccccaactcacaacacccc

SEQ ID NO: 5387 - DNA, 20 bp, Artificial Sequence
  Synthetic: descartes_1300_CFI
acttcaccccactgaagtga

SEQ ID NO: 5388 - DNA, 20 bp, Artificial Sequence
  Synthetic: descartes_1301_CFI
gtgtaaacacctgggaactc

SEQ ID NO: 5389 - DNA, 20 bp, Artificial Sequence
  Synthetic: descartes_1302_CFI
tagagagatcagacaactta

SEQ ID NO: 5390 - DNA, 20 bp, Artificial Sequence
  Synthetic: descartes_1303_CFI
actggattagctaccatgta

SEQ ID NO: 5391 - DNA, 20 bp, Artificial Sequence
  Synthetic: descartes_1304_CFI
agttgtctgatctctctata

SEQ ID NO: 5392 - DNA, 20 bp, Artificial Sequence
  Synthetic: descartes_1305_CFI
actccacaagatagtttagg

SEQ ID NO: 5393 - DNA, 20 bp, Artificial Sequence
  Synthetic: descartes_1306_CFI
atggaaaataattctatcca

SEQ ID NO: 5394 - DNA, 20 bp, Artificial Sequence
  Synthetic: descartes_1307_CHD1
gcaggaaccaatcaaaaacc

SEQ ID NO: 5395 - DNA, 20 bp, Artificial Sequence
  Synthetic: descartes_1308_CHD1
gcctctgctgacactgttgt

SEQ ID NO: 5396 - DNA, 20 bp, Artificial Sequence
  Synthetic: descartes_1309_CHD1
ccttctgagatggaatcact

SEQ ID NO: 5397 - DNA, 20 bp, Artificial Sequence
  Synthetic: descartes_1310_CHD1
actgtaggagatgaattgct

SEQ ID NO: 5398 - DNA, 20 bp, Artificial Sequence
  Synthetic: descartes_1311_CHD1
atgaggtagcaatggttaca

SEQ ID NO: 5399 - DNA, 20 bp, Artificial Sequence
  Synthetic: descartes_1312_CHD1
ggtgacattaacagcagaaa

SEQ ID NO: 5400 - DNA, 20 bp, Artificial Sequence
  Synthetic: descartes_1313_CHD1
tatgctcccaagaatgagaa

SEQ ID NO: 5401 - DNA, 20 bp, Artificial Sequence
  Synthetic: descartes_1314_CHD1
tcccaatccgacaatccata

SEQ ID NO: 5402 - DNA, 20 bp, Artificial Sequence
  Synthetic: descartes_1315_CHD2
gcttcagcggacacagtcgt

SEQ ID NO: 5403 - DNA, 20 bp, Artificial Sequence
  Synthetic: descartes_1316_CHD2
ggaggggagaatctggaact

SEQ ID NO: 5404 - DNA, 20 bp, Artificial Sequence
  Synthetic: descartes_1317_CHD2
acattaacctgaactccgga

SEQ ID NO: 5405 - DNA, 20 bp, Artificial Sequence
  Synthetic: descartes_1318_CHD2
gagagatcactagaacagaa

SEQ ID NO: 5406 - DNA, 20 bp, Artificial Sequence
  Synthetic: descartes_1319_CHD2
cataggtgacctgatgagca

SEQ ID NO: 5407 - DNA, 20 bp, Artificial Sequence
  Synthetic: descartes_1320_CHD2
tgttctagtgatctctccaa

SEQ ID NO: 5408 - DNA, 20 bp, Artificial Sequence
  Synthetic: descartes_1321_CHD2
acgggcctcatcctctcctt

SEQ ID NO: 5409 - DNA, 20 bp, Artificial Sequence
  Synthetic: descartes_1322_CHD2
catagccatgttcataaatc

SEQ ID NO: 5410 - DNA, 20 bp, Artificial Sequence
  Synthetic: descartes_1323_CHD3
gtaggagaggaggctctgga

SEQ ID NO: 5411 - DNA, 20 bp, Artificial Sequence
  Synthetic: descartes_1324_CHD3
cccaccctgctggcacacct

SEQ ID NO: 5412 - DNA, 20 bp, Artificial Sequence
  Synthetic: descartes_1325_CHD3
gatacataaccaaatggaag

SEQ ID NO: 5413 - DNA, 20 bp, Artificial Sequence
  Synthetic: descartes_1326_CHD3
gaggtgcagggactgttggt

SEQ ID NO: 5414 - DNA, 20 bp, Artificial Sequence
  Synthetic: descartes_1327_CHD3
ggtgcccacatctggaactc

SEQ ID NO: 5415 - DNA, 20 bp, Artificial Sequence
  Synthetic: descartes_1328_CHD3
ctgacatatccaaagaggac

SEQ ID NO: 5416 - DNA, 20 bp, Artificial Sequence
  Synthetic: descartes_1329_CHD3
acgagagacatgactccaat

SEQ ID NO: 5417 - DNA, 20 bp, Artificial Sequence
  Synthetic: descartes_1330_CHD3
ctagatagtggtaattcccc

SEQ ID NO: 5418 - DNA, 20 bp, Artificial Sequence
  Synthetic: descartes_1331_CHD4
gctgacgagcattaaaacca

SEQ ID NO: 5419 - DNA, 20 bp, Artificial Sequence
  Synthetic: descartes_1332_CHD4
gagtgaggatgtacttgtag

SEQ ID NO: 5420 - DNA, 20 bp, Artificial Sequence
  Synthetic: descartes_1333_CHD4
ggaacatcacctgacagtgc

SEQ ID NO: 5421 - DNA, 20 bp, Artificial Sequence
  Synthetic: descartes_1334_CHD4
ccaaggcccatctcatcagc

SEQ ID NO: 5422 - DNA, 20 bp, Artificial Sequence
  Synthetic: descartes_1335_CHD4
gttccaagcgtaagagatcc

SEQ ID NO: 5423 - DNA, 20 bp, Artificial Sequence
  Synthetic: descartes_1336_CHD4
gcttcccactggatgccttc

SEQ ID NO: 5424 - DNA, 20 bp, Artificial Sequence
  Synthetic: descartes_1337_CHD4
gcggaaagtcatcagcacct

SEQ ID NO: 5425 - DNA, 20 bp, Artificial Sequence
  Synthetic: descartes_1338_CHD4
tcttcatcaccaccaaagtc

SEQ ID NO: 5426 - DNA, 20 bp, Artificial Sequence
  Synthetic: descartes_1339_CHD5
cctgtggagcccgtgagcct

SEQ ID NO: 5427 - DNA, 20 bp, Artificial Sequence
  Synthetic: descartes_1340_CHD5
ctgacatctccaaggaagac

SEQ ID NO: 5428 - DNA, 20 bp, Artificial Sequence
  Synthetic: descartes_1341_CHD5
ccagaggatacagcagcccg

SEQ ID NO: 5429 - DNA, 20 bp, Artificial Sequence
  Synthetic: descartes_1342_CHD5
ggctcctcccagatgtacag

SEQ ID NO: 5430 - DNA, 20 bp, Artificial Sequence
  Synthetic: descartes_1343_CHD5
ctttgaggacaacgccattc

SEQ ID NO: 5431 - DNA, 20 bp, Artificial Sequence
  Synthetic: descartes_1344_CHD5
aggtccatcatgatgttgag

SEQ ID NO: 5432 - DNA, 20 bp, Artificial Sequence
  Synthetic: descartes_1345_CHD5
gggtcttaaacagctacaag

SEQ ID NO: 5433 - DNA, 20 bp, Artificial Sequence
  Synthetic: descartes_1346_CHD5
ttcggggagtagtcactgcc

SEQ ID NO: 5434 - DNA, 20 bp, Artificial Sequence
  Synthetic: descartes_1347_CHD6
cctaggcccatctcatcagc

SEQ ID NO: 5435 - DNA, 20 bp, Artificial Sequence
  Synthetic: descartes_1348_CHD6
ctaggaaaatgacatcccat

SEQ ID NO: 5436 - DNA, 20 bp, Artificial Sequence
  Synthetic: descartes_1349_CHD6
aggagagcccaagtaccaat

SEQ ID NO: 5437 - DNA, 20 bp, Artificial Sequence
  Synthetic: descartes_1350_CHD6
gcttccccttccttgaatcc

SEQ ID NO: 5438 - DNA, 20 bp, Artificial Sequence
  Synthetic: descartes_1351_CHD6
actgcagcactgatcaagaa

SEQ ID NO: 5439 - DNA, 20 bp, Artificial Sequence
  Synthetic: descartes_1352_CHD6
actacaaatctccatcccca

SEQ ID NO: 5440 - DNA, 20 bp, Artificial Sequence
  Synthetic: descartes_1353_CHD6
aagggactctgaagtcctac

SEQ ID NO: 5441 - DNA, 20 bp, Artificial Sequence
  Synthetic: descartes_1354_CHD6
ccagaccaactccaagttat

SEQ ID NO: 5442 - DNA, 20 bp, Artificial Sequence
  Synthetic: descartes_1355_CHD7
gcagcaccaaccagcaagtc

SEQ ID NO: 5443 - DNA, 20 bp, Artificial Sequence
  Synthetic: descartes_1356_CHD7
catgcagcagcatggtcagc

SEQ ID NO: 5444 - DNA, 20 bp, Artificial Sequence
  Synthetic: descartes_1357_CHD7
tgagaccacctgagactctc

SEQ ID NO: 5445 - DNA, 20 bp, Artificial Sequence
  Synthetic: descartes_1358_CHD7
ggaaaaactatccagtccat

SEQ ID NO: 5446 - DNA, 20 bp, Artificial Sequence
  Synthetic: descartes_1359_CHD7
gcagcagcttgtcaatcagc

SEQ ID NO: 5447 - DNA, 20 bp, Artificial Sequence
  Synthetic: descartes_1360_CHD7
gtagaagatcctctatttct

SEQ ID NO: 5448 - DNA, 20 bp, Artificial Sequence
  Synthetic: descartes_1361_CHD7
atgggaatcctacagcattg

SEQ ID NO: 5449 - DNA, 20 bp, Artificial Sequence
  Synthetic: descartes_1362_CHD7
tgtgcatccaagaaggataa

SEQ ID NO: 5450 - DNA, 20 bp, Artificial Sequence
  Synthetic: descartes_1363_CHD8
gtgtggaatatgaccctgac

SEQ ID NO: 5451 - DNA, 20 bp, Artificial Sequence
  Synthetic: descartes_1364_CHD8
ggaatggaaccagtacagac

SEQ ID NO: 5452 - DNA, 20 bp, Artificial Sequence
  Synthetic: descartes_1365_CHD8
atccccacggtagtgtagaa

SEQ ID NO: 5453 - DNA, 20 bp, Artificial Sequence
  Synthetic: descartes_1366_CHD8
cctcagaatcagagtttctc

SEQ ID NO: 5454 - DNA, 20 bp, Artificial Sequence
  Synthetic: descartes_1367_CHD8
gggccaggcaaccacttgct

SEQ ID NO: 5455 - DNA, 20 bp, Artificial Sequence
  Synthetic: descartes_1368_CHD8
atgtatcctcttatccttct

SEQ ID NO: 5456 - DNA, 20 bp, Artificial Sequence
  Synthetic: descartes_1369_CHD8
agctgggctaatcaagtccc

SEQ ID NO: 5457 - DNA, 20 bp, Artificial Sequence
  Synthetic: descartes_1370_CHD8
gctcccatgtgctatcctca

SEQ ID NO: 5458 - DNA, 20 bp, Artificial Sequence
  Synthetic: descartes_1371_CHD9
actggcacccctctccaaaa

SEQ ID NO: 5459 - DNA, 20 bp, Artificial Sequence
  Synthetic: descartes_1372_CHD9
ggattaagagtggcttcctc

SEQ ID NO: 5460 - DNA, 20 bp, Artificial Sequence
  Synthetic: descartes_1373_CHD9
ggatatgctgagtagattct

SEQ ID NO: 5461 - DNA, 20 bp, Artificial Sequence
  Synthetic: descartes_1374_CHD9
acagaaataaaccacctaat

SEQ ID NO: 5462 - DNA, 20 bp, Artificial Sequence
  Synthetic: descartes_1375_CHD9
ggtaccagaaccagaccact

SEQ ID NO: 5463 - DNA, 20 bp, Artificial Sequence
  Synthetic: descartes_1376_CHD9
acctatgtgcttcatcaata

SEQ ID NO: 5464 - DNA, 20 bp, Artificial Sequence
  Synthetic: descartes_1377_CHD9
gtgatatatgattactggaa

SEQ ID NO: 5465 - DNA, 20 bp, Artificial Sequence
  Synthetic: descartes_1378_CHD9
atatgggatctcattactcc

SEQ ID NO: 5466 - DNA, 20 bp, Artificial Sequence
  Synthetic: descartes_1379_CHUK
gtagtagaacccatggaaaa

SEQ ID NO: 5467 - DNA, 20 bp, Artificial Sequence
  Synthetic: descartes_1380_CHUK
cctgcatgaacatgacagta

SEQ ID NO: 5468 - DNA, 20 bp, Artificial Sequence
  Synthetic: descartes_1381_CHUK
cgaggatccagagaaattcc

SEQ ID NO: 5469 - DNA, 20 bp, Artificial Sequence
  Synthetic: descartes_1382_CHUK
cctcaaccaaatagcctttg

SEQ ID NO: 5470 - DNA, 20 bp, Artificial Sequence
  Synthetic: descartes_1383_CHUK
gttgaggtaaatggctacta

SEQ ID NO: 5471 - DNA, 20 bp, Artificial Sequence
  Synthetic: descartes_1384_CHUK
gtagccatttacctcaacca

SEQ ID NO: 5472 - DNA, 20 bp, Artificial Sequence
  Synthetic: descartes_1385_CHUK
gtccagacacatagtgcact

SEQ ID NO: 5473 - DNA, 20 bp, Artificial Sequence
  Synthetic: descartes_1386_CHUK
ggagatctcctccagaacag

SEQ ID NO: 5474 - DNA, 20 bp, Artificial Sequence
  Synthetic: descartes_1387_CKS2
gaagaggtcgtctaaagaga

SEQ ID NO: 5475 - DNA, 20 bp, Artificial Sequence
  Synthetic: descartes_1388_CKS2
gacgacctcttccaaaagat

SEQ ID NO: 5476 - DNA, 20 bp, Artificial Sequence
  Synthetic: descartes_1389_CKS2
caaacaagtacctaaaactc

SEQ ID NO: 5477 - DNA, 20 bp, Artificial Sequence
  Synthetic: descartes_1390_CKS2
gaaagttctctgggtaacat

SEQ ID NO: 5478 - DNA, 20 bp, Artificial Sequence
  Synthetic: descartes_1391_CKS2
ggtacttgtttggaaagttc

SEQ ID NO: 5479 - DNA, 20 bp, Artificial Sequence
  Synthetic: descartes_1392_CKS2
ttgatcttttggaagaggtc

SEQ ID NO: 5480 - DNA, 20 bp, Artificial Sequence
  Synthetic: descartes_1393_CLC
gtcagggagatatctctcca

SEQ ID NO: 5481 - DNA, 20 bp, Artificial Sequence
  Synthetic: descartes_1394_CLC
attgtcacagtagaaccagt

SEQ ID NO: 5482 - DNA, 20 bp, Artificial Sequence
  Synthetic: descartes_1395_CLC
atgtcagctatttaaagaga

SEQ ID NO: 5483 - DNA, 20 bp, Artificial Sequence
  Synthetic: descartes_1396_CLC
cacactgagatgaaggagga

SEQ ID NO: 5484 - DNA, 20 bp, Artificial Sequence
  Synthetic: descartes_1397_CLC
aactgagcatctcagtgctg

SEQ ID NO: 5485 - DNA, 20 bp, Artificial Sequence
  Synthetic: descartes_1398_CLC
tctactggttctactgtgac

SEQ ID NO: 5486 - DNA, 20 bp, Artificial Sequence
  Synthetic: descartes_1399_CLC
gtcgtcgtgtggtcatgaac

SEQ ID NO: 5487 - DNA, 20 bp, Artificial Sequence
  Synthetic: descartes_1400_CLC
aggatggccaagaatttgaa

SEQ ID NO: 5488 - DNA, 20 bp, Artificial Sequence
  Synthetic: descartes_1401_CLEC10A
agagggacctggtgaccctg

SEQ ID NO: 5489 - DNA, 20 bp, Artificial Sequence
  Synthetic: descartes_1402_CLEC10A
gaatccaaccacacagatga

SEQ ID NO: 5490 - DNA, 20 bp, Artificial Sequence
  Synthetic: descartes_1403_CLEC10A
gcaacttcacctcaaacact

SEQ ID NO: 5491 - DNA, 20 bp, Artificial Sequence
  Synthetic: descartes_1404_CLEC10A
aggtgaagttgctaaaatct

SEQ ID NO: 5492 - DNA, 20 bp, Artificial Sequence
  Synthetic: descartes_1405_CLEC10A
agaatgaactgggacacaca

SEQ ID NO: 5493 - DNA, 20 bp, Artificial Sequence
  Synthetic: descartes_1406_CLEC10A
agagatgctatcgtttcttc

SEQ ID NO: 5494 - DNA, 20 bp, Artificial Sequence
  Synthetic: descartes_1407_CLEC10A
tccagaaatatctaggctcc

SEQ ID NO: 5495 - DNA, 20 bp, Artificial Sequence
  Synthetic: descartes_1408_CLEC10A
aacccctggactttcacctt

SEQ ID NO: 5496 - DNA, 20 bp, Artificial Sequence
  Synthetic: descartes_1409_CLEC4A
atcttccagaatctgcaaga

SEQ ID NO: 5497 - DNA, 20 bp, Artificial Sequence
  Synthetic: descartes_1410_CLEC4A
acacactccaatgttgtatg

SEQ ID NO: 5498 - DNA, 20 bp, Artificial Sequence
  Synthetic: descartes_1411_CLEC4A
tgagatgatgaagatccact

SEQ ID NO: 5499 - DNA, 20 bp, Artificial Sequence
  Synthetic: descartes_1412_CLEC4A
tgaggggcagtcctctcctt

SEQ ID NO: 5500 - DNA, 20 bp, Artificial Sequence
  Synthetic: descartes_1413_CLEC4A
tcaccagcaggtgagcctcc

SEQ ID NO: 5501 - DNA, 20 bp, Artificial Sequence
  Synthetic: descartes_1414_CLEC4A
gttccaactgctactttatt

SEQ ID NO: 5502 - DNA, 20 bp, Artificial Sequence
  Synthetic: descartes_1415_CLEC4A
attgtatggtgtctgatcaa

SEQ ID NO: 5503 - DNA, 20 bp, Artificial Sequence
  Synthetic: descartes_1416_CLEC4A
gcacaacgcagcgctcattg

SEQ ID NO: 5504 - DNA, 20 bp, Artificial Sequence
  Synthetic: descartes_1417_CLEC4C
tgtatagcaaaactgtcaag

SEQ ID NO: 5505 - DNA, 20 bp, Artificial Sequence
  Synthetic: descartes_1418_CLEC4C
attgtatggtgtctggtcaa

SEQ ID NO: 5506 - DNA, 20 bp, Artificial Sequence
  Synthetic: descartes_1419_CLEC4C
caagatgaagaagatctaca

SEQ ID NO: 5507 - DNA, 20 bp, Artificial Sequence
  Synthetic: descartes_1420_CLEC4C
atcattcagaatctgaaaag

SEQ ID NO: 5508 - DNA, 20 bp, Artificial Sequence
  Synthetic: descartes_1421_CLEC4C
actcttagtccaagattgca

SEQ ID NO: 5509 - DNA, 20 bp, Artificial Sequence
  Synthetic: descartes_1422_CLEC4C
agtctagttgctactttatt

SEQ ID NO: 5510 - DNA, 20 bp, Artificial Sequence
  Synthetic: descartes_1423_CLEC4C
tactgggatgcaatcttgga

SEQ ID NO: 5511 - DNA, 20 bp, Artificial Sequence
  Synthetic: descartes_1424_CLEC4C
ttatcgcacaacgctcatca

SEQ ID NO: 5512 - DNA, 20 bp, Artificial Sequence
  Synthetic: descartes_1425_CLEC4D
tggatagacggctttcctat

SEQ ID NO: 5513 - DNA, 20 bp, Artificial Sequence
  Synthetic: descartes_1426_CLEC4D
cttggacttagagatgagaa

SEQ ID NO: 5514 - DNA, 20 bp, Artificial Sequence
  Synthetic: descartes_1427_CLEC4D
atcttacttctcagtgtctg

SEQ ID NO: 5515 - DNA, 20 bp, Artificial Sequence
  Synthetic: descartes_1428_CLEC4D
caaatcctacttgcttcaaa

SEQ ID NO: 5516 - DNA, 20 bp, Artificial Sequence
  Synthetic: descartes_1429_CLEC4D
ctcttactgacaacaagacg

SEQ ID NO: 5517 - DNA, 20 bp, Artificial Sequence
  Synthetic: descartes_1430_CLEC4D
actctcagcccacgtcttgt

SEQ ID NO: 5518 - DNA, 20 bp, Artificial Sequence
  Synthetic: descartes_1431_CLEC4D
acgctgtaagagaggcacag

SEQ ID NO: 5519 - DNA, 20 bp, Artificial Sequence
  Synthetic: descartes_1432_CLEC4D
tccctgagagttgtcgggtt

SEQ ID NO: 5520 - DNA, 20 bp, Artificial Sequence
  Synthetic: descartes_1433_CLEC4G
tctgtgccaaagacgacgtg

SEQ ID NO: 5521 - DNA, 20 bp, Artificial Sequence
  Synthetic: descartes_1434_CLEC4G
tcacagatccagccgtcctt

SEQ ID NO: 5522 - DNA, 20 bp, Artificial Sequence
  Synthetic: descartes_1435_CLEC4G
ggctgtgattctgagtatcc

SEQ ID NO: 5523 - DNA, 20 bp, Artificial Sequence
  Synthetic: descartes_1436_CLEC4G
gcacagagaaaaagtagcag

SEQ ID NO: 5524 - DNA, 20 bp, Artificial Sequence
  Synthetic: descartes_1437_CLEC4G
tcctcagcaggtcgtggccg

SEQ ID NO: 5525 - DNA, 20 bp, Artificial Sequence
  Synthetic: descartes_1438_CLEC4M
gtggcagtggctggaacgac

SEQ ID NO: 5526 - DNA, 20 bp, Artificial Sequence
  Synthetic: descartes_1439_CLEC4M
cttggaagaatgtccagtcc

SEQ ID NO: 5527 - DNA, 20 bp, Artificial Sequence
  Synthetic: descartes_1440_CLEC4M
tctgagagctcacccactgc

SEQ ID NO: 5528 - DNA, 20 bp, Artificial Sequence
  Synthetic: descartes_1441_CLEC4M
ggtctgaaagtcccatccag

SEQ ID NO: 5529 - DNA, 20 bp, Artificial Sequence
  Synthetic: descartes_1442_CLEC4M
tctggcaactcacccactgc

SEQ ID NO: 5530 - DNA, 20 bp, Artificial Sequence
  Synthetic: descartes_1443_CLEC4M
aattccagcagatacatggc

SEQ ID NO: 5531 - DNA, 20 bp, Artificial Sequence
  Synthetic: descartes_1444_CLEC4M
cagatccagtaattgtcaac

SEQ ID NO: 5532 - DNA, 20 bp, Artificial Sequence
  Synthetic: descartes_1445_CLEC4M
caagagactttcaattccag

SEQ ID NO: 5533 - DNA, 20 bp, Artificial Sequence
  Synthetic: descartes_1446_CLEC6A
gtctaagagtgagcagaact

SEQ ID NO: 5534 - DNA, 20 bp, Artificial Sequence
  Synthetic: descartes_1447_CLEC6A
accatatgtaaaatggtaag

SEQ ID NO: 5535 - DNA, 20 bp, Artificial Sequence
  Synthetic: descartes_1448_CLEC6A
catatggtgaaactggcaaa

SEQ ID NO: 5536 - DNA, 20 bp, Artificial Sequence
  Synthetic: descartes_1449_CLEC6A
attgtccagcagctgaatga

SEQ ID NO: 5537 - DNA, 20 bp, Artificial Sequence
  Synthetic: descartes_1450_CLEC6A
gttgtgttcaacacagaagc

SEQ ID NO: 5538 - DNA, 20 bp, Artificial Sequence
  Synthetic: descartes_1451_CLEC6A
gcacctaggtgagcccaatc

SEQ ID NO: 5539 - DNA, 20 bp, Artificial Sequence
  Synthetic: descartes_1452_CLEC6A
agacccacaaggtaataata

SEQ ID NO: 5540 - DNA, 20 bp, Artificial Sequence
  Synthetic: descartes_1453_CLEC6A
gttccagttgctacttcatt

SEQ ID NO: 5541 - DNA, 20 bp, Artificial Sequence
  Synthetic: descartes_1454_CLECL1
ccttatgcaccttccagtct

SEQ ID NO: 5542 - DNA, 20 bp, Artificial Sequence
  Synthetic: descartes_1455_CLECL1
gatacacagagacatcagag

SEQ ID NO: 5543 - DNA, 20 bp, Artificial Sequence
  Synthetic: descartes_1456_CLECL1
atgtcagcgtagactacatc

SEQ ID NO: 5544 - DNA, 20 bp, Artificial Sequence
  Synthetic: descartes_1457_CLECL1
tggacagtagaaaagttgaa

SEQ ID NO: 5545 - DNA, 20 bp, Artificial Sequence
  Synthetic: descartes_1458_CLECL1
aaggtacagcaaaaaggtga

SEQ ID NO: 5546 - DNA, 20 bp, Artificial Sequence
  Synthetic: descartes_1459_CLECL1
tactgtccataaatcatgtc

SEQ ID NO: 5547 - DNA, 20 bp, Artificial Sequence
  Synthetic: descartes_1460_CLECL1
ctgtaccttcaaatggcatt

SEQ ID NO: 5548 - DNA, 20 bp, Artificial Sequence
  Synthetic: descartes_1461_CLECL1
ttccatgtcatacaagtatt

SEQ ID NO: 5549 - DNA, 20 bp, Artificial Sequence
  Synthetic: descartes_1462_CLIP1
gatgaacccataggcaagaa

SEQ ID NO: 5550 - DNA, 20 bp, Artificial Sequence
  Synthetic: descartes_1463_CLIP1
agtgaagtcagtcaagtgaa

SEQ ID NO: 5551 - DNA, 20 bp, Artificial Sequence
  Synthetic: descartes_1464_CLIP1
gagagaaagatgagagagaa

SEQ ID NO: 5552 - DNA, 20 bp, Artificial Sequence
  Synthetic: descartes_1465_CLIP1
agtgtcaacccaaatatggc

SEQ ID NO: 5553 - DNA, 20 bp, Artificial Sequence
  Synthetic: descartes_1466_CLIP1
gacttccatagagctatcac

SEQ ID NO: 5554 - DNA, 20 bp, Artificial Sequence
  Synthetic: descartes_1467_CLIP1
ccttgagctcgagcttcacc

SEQ ID NO: 5555 - DNA, 20 bp, Artificial Sequence
  Synthetic: descartes_1468_CLIP1
ggtcatccccgttcccattc

SEQ ID NO: 5556 - DNA, 20 bp, Artificial Sequence
  Synthetic: descartes_1469_CLIP1
cccgaccttcaaagttaaca

SEQ ID NO: 5557 - DNA, 20 bp, Artificial Sequence
  Synthetic: descartes_1470_CLIP4
gctgttctccaagatatgga

SEQ ID NO: 5558 - DNA, 20 bp, Artificial Sequence
  Synthetic: descartes_1471_CLIP4
ggaagaagcagaagttgtgc

SEQ ID NO: 5559 - DNA, 20 bp, Artificial Sequence
  Synthetic: descartes_1472_CLIP4
aagctctataccataccaat

SEQ ID NO: 5560 - DNA, 20 bp, Artificial Sequence
  Synthetic: descartes_1473_CLIP4
aattcctcagcaacatctac

SEQ ID NO: 5561 - DNA, 20 bp, Artificial Sequence
  Synthetic: descartes_1474_CLIP4
tgggacctgatgagaggtac

SEQ ID NO: 5562 - DNA, 20 bp, Artificial Sequence
  Synthetic: descartes_1475_CLIP4
acctgtaagccgaaccatgg

SEQ ID NO: 5563 - DNA, 20 bp, Artificial Sequence
  Synthetic: descartes_1476_CLIP4
gcacaacttctgcttcttcc

SEQ ID NO: 5564 - DNA, 20 bp, Artificial Sequence
  Synthetic: descartes_1477_CLIP4
cattatacctgcaaatctgg

SEQ ID NO: 5565 - DNA, 20 bp, Artificial Sequence
  Synthetic: descartes_1478_CLOCK
ccgtaagctgtagtaaaatg

SEQ ID NO: 5566 - DNA, 20 bp, Artificial Sequence
  Synthetic: descartes_1479_CLOCK
aaggaactatacaacgcaca

SEQ ID NO: 5567 - DNA, 20 bp, Artificial Sequence
  Synthetic: descartes_1480_CLOCK
atcacagcccaaccccttct

SEQ ID NO: 5568 - DNA, 20 bp, Artificial Sequence
  Synthetic: descartes_1481_CLOCK
taggtcatccacatgatagt

SEQ ID NO: 5569 - DNA, 20 bp, Artificial Sequence
  Synthetic: descartes_1482_CLOCK
actagcatctgactgtgcag

SEQ ID NO: 5570 - DNA, 20 bp, Artificial Sequence
  Synthetic: descartes_1483_CLOCK
tgcagaacagtagatttgtc

SEQ ID NO: 5571 - DNA, 20 bp, Artificial Sequence
  Synthetic: descartes_1484_CLOCK
atgggttggtggaagaagat

SEQ ID NO: 5572 - DNA, 20 bp, Artificial Sequence
  Synthetic: descartes_1485_CLOCK
ctctacaacagagcaccttc

SEQ ID NO: 5573 - DNA, 20 bp, Artificial Sequence
  Synthetic: descartes_1486_CLU
actgggtgtcccggctggca

SEQ ID NO: 5574 - DNA, 20 bp, Artificial Sequence
  Synthetic: descartes_1487_CLU
gggttcttcctggagacttc

SEQ ID NO: 5575 - DNA, 20 bp, Artificial Sequence
  Synthetic: descartes_1488_CLU
aggcagggcttacactcttc

SEQ ID NO: 5576 - DNA, 20 bp, Artificial Sequence
  Synthetic: descartes_1489_CLU
ccagccgggacacccagtta

SEQ ID NO: 5577 - DNA, 20 bp, Artificial Sequence
  Synthetic: descartes_1490_CLU
ctggtcaacctctcagcgac

SEQ ID NO: 5578 - DNA, 20 bp, Artificial Sequence
  Synthetic: descartes_1491_CLU
tccgccacggtctccataaa

SEQ ID NO: 5579 - DNA, 20 bp, Artificial Sequence
  Synthetic: descartes_1492_CLU
ccaagtcccgcatcgtccgc

SEQ ID NO: 5580 - DNA, 20 bp, Artificial Sequence
  Synthetic: descartes_1493_CLU
tatgagagtctttatctgtt

SEQ ID NO: 5581 - DNA, 20 bp, Artificial Sequence
  Synthetic: descartes_1494_COCH
actgactatagcaccaaaga

SEQ ID NO: 5582 - DNA, 20 bp, Artificial Sequence
  Synthetic: descartes_1495_COCH
tgatgacagctaggacattc

SEQ ID NO: 5583 - DNA, 20 bp, Artificial Sequence
  Synthetic: descartes_1496_COCH
gcaccacaaaatacgtaaag

SEQ ID NO: 5584 - DNA, 20 bp, Artificial Sequence
  Synthetic: descartes_1497_COCH
ccagaggcttggacatcagg

SEQ ID NO: 5585 - DNA, 20 bp, Artificial Sequence
  Synthetic: descartes_1498_COCH
ccataaaggaagtaggtttc

SEQ ID NO: 5586 - DNA, 20 bp, Artificial Sequence
  Synthetic: descartes_1499_COCH
gccctataagggagagcccc

SEQ ID NO: 5587 - DNA, 20 bp, Artificial Sequence
  Synthetic: descartes_1500_COCH
tgtggccaagcctatccctg

SEQ ID NO: 5588 - DNA, 20 bp, Artificial Sequence
  Synthetic: descartes_1501_COCH
gtgctatagtcagtgaaact

SEQ ID NO: 5589 - DNA, 20 bp, Artificial Sequence
  Synthetic: descartes_1502_COL7A1
ggattagctggagcacaggc

SEQ ID NO: 5590 - DNA, 20 bp, Artificial Sequence
  Synthetic: descartes_1503_COL7A1
ctgggagtatctggtgcctc

SEQ ID NO: 5591 - DNA, 20 bp, Artificial Sequence
  Synthetic: descartes_1504_COL7A1
ccatccagtccgctccggcc

SEQ ID NO: 5592 - DNA, 20 bp, Artificial Sequence
  Synthetic: descartes_1505_COL7A1
gtccatcctctccaggatct

SEQ ID NO: 5593 - DNA, 20 bp, Artificial Sequence
  Synthetic: descartes_1506_COL7A1
tcctcggataccaggcactc

SEQ ID NO: 5594 - DNA, 20 bp, Artificial Sequence
  Synthetic: descartes_1507_COL7A1
acccacaggcccccgaactc

SEQ ID NO: 5595 - DNA, 20 bp, Artificial Sequence
  Synthetic: descartes_1508_COL7A1
tctggagcagccagtgcaca

SEQ ID NO: 5596 - DNA, 20 bp, Artificial Sequence
  Synthetic: descartes_1509_COL7A1
ccggagagtgtgcacgactg

SEQ ID NO: 5597 - DNA, 20 bp, Artificial Sequence
  Synthetic: descartes_1510_CORO1A
accctgacaccaacatcgtc

SEQ ID NO: 5598 - DNA, 20 bp, Artificial Sequence
  Synthetic: descartes_1511_CORO1A
ggggtacgtagccatccttg

SEQ ID NO: 5599 - DNA, 20 bp, Artificial Sequence
  Synthetic: descartes_1512_CORO1A
ctgcactatctctccatgtt

SEQ ID NO: 5600 - DNA, 20 bp, Artificial Sequence
  Synthetic: descartes_1513_CORO1A
gaggcactgtcatggcaatg

SEQ ID NO: 5601 - DNA, 20 bp, Artificial Sequence
  Synthetic: descartes_1514_CORO1A
ggcatgtagcccatgccccg

SEQ ID NO: 5602 - DNA, 20 bp, Artificial Sequence
  Synthetic: descartes_1515_CORO1A
agatcacttccgaggcccct

SEQ ID NO: 5603 - DNA, 20 bp, Artificial Sequence
  Synthetic: descartes_1516_CORO1A
gacagccggccaaggccgac

SEQ ID NO: 5604 - DNA, 20 bp, Artificial Sequence
  Synthetic: descartes_1517_CORO1A
tggccctgatctgtgaggcc

SEQ ID NO: 5605 - DNA, 20 bp, Artificial Sequence
  Synthetic: descartes_1518_CR1
actatggatcagtggtgacc

SEQ ID NO: 5606 - DNA, 20 bp, Artificial Sequence
  Synthetic: descartes_1519_CR1
ggtgtcagcctggctttgtc

SEQ ID NO: 5607 - DNA, 20 bp, Artificial Sequence
  Synthetic: descartes_1520_CR1
ctgtgtgtctcccattagga

SEQ ID NO: 5608 - DNA, 20 bp, Artificial Sequence
  Synthetic: descartes_1521_CR1
ccattgggacatatctgaac

SEQ ID NO: 5609 - DNA, 20 bp, Artificial Sequence
  Synthetic: descartes_1522_CR1
attagcaccaacagagagaa

SEQ ID NO: 5610 - DNA, 20 bp, Artificial Sequence
  Synthetic: descartes_1523_CR1
ccaggcctaccaacctaact

SEQ ID NO: 5611 - DNA, 20 bp, Artificial Sequence
  Synthetic: descartes_1524_CR1
acctgggcaggaagtgttct

SEQ ID NO: 5612 - DNA, 20 bp, Artificial Sequence
  Synthetic: descartes_1525_CR1
tgtacagaccagggaatctg

SEQ ID NO: 5613 - DNA, 20 bp, Artificial Sequence
  Synthetic: descartes_1526_CR2
gtccaagcaactccctgtcc

SEQ ID NO: 5614 - DNA, 20 bp, Artificial Sequence
  Synthetic: descartes_1527_CR2
cctgtaaaaccaacttctcc

SEQ ID NO: 5615 - DNA, 20 bp, Artificial Sequence
  Synthetic: descartes_1528_CR2
ccgaagacaaacagttaatg

SEQ ID NO: 5616 - DNA, 20 bp, Artificial Sequence
  Synthetic: descartes_1529_CR2
catatggaaccacggtcact

SEQ ID NO: 5617 - DNA, 20 bp, Artificial Sequence
  Synthetic: descartes_1530_CR2
caggcaaatgtcacagaatc

SEQ ID NO: 5618 - DNA, 20 bp, Artificial Sequence
  Synthetic: descartes_1531_CR2
ctgaaggcatacagtgaatg

SEQ ID NO: 5619 - DNA, 20 bp, Artificial Sequence
  Synthetic: descartes_1532_CR2
cctctcgagtgtccagcact

SEQ ID NO: 5620 - DNA, 20 bp, Artificial Sequence
  Synthetic: descartes_1533_CR2
cccatcacctccccctattc

SEQ ID NO: 5621 - DNA, 20 bp, Artificial Sequence
  Synthetic: descartes_1534_CRACR2A
cctatcacagagccagatct

SEQ ID NO: 5622 - DNA, 20 bp, Artificial Sequence
  Synthetic: descartes_1535_CRACR2A
gggcacactccagttcattc

SEQ ID NO: 5623 - DNA, 20 bp, Artificial Sequence
  Synthetic: descartes_1536_CRACR2A
gcatcccaaggagaagctcc

SEQ ID NO: 5624 - DNA, 20 bp, Artificial Sequence
  Synthetic: descartes_1537_CRACR2A
ggctccaagtctgtccatca

SEQ ID NO: 5625 - DNA, 20 bp, Artificial Sequence
  Synthetic: descartes_1538_CRACR2A
aagacttcctgaccagaatc

SEQ ID NO: 5626 - DNA, 20 bp, Artificial Sequence
  Synthetic: descartes_1539_CRACR2A
tccctgtaccccctggtcag

SEQ ID NO: 5627 - DNA, 20 bp, Artificial Sequence
  Synthetic: descartes_1540_CRACR2A
ctgtccaactttgaagactt

SEQ ID NO: 5628 - DNA, 20 bp, Artificial Sequence
  Synthetic: descartes_1541_CRACR2A
caacttgccctggaagcagc

SEQ ID NO: 5629 - DNA, 20 bp, Artificial Sequence
  Synthetic: descartes_1542_CREBBP
ccatgagatccttattggat

SEQ ID NO: 5630 - DNA, 20 bp, Artificial Sequence
  Synthetic: descartes_1543_CREBBP
accagacccacccaggcctc

SEQ ID NO: 5631 - DNA, 20 bp, Artificial Sequence
  Synthetic: descartes_1544_CREBBP
cccaccttccctacagatat

SEQ ID NO: 5632 - DNA, 20 bp, Artificial Sequence
  Synthetic: descartes_1545_CREBBP
actggctgcagtgctctctt

SEQ ID NO: 5633 - DNA, 20 bp, Artificial Sequence
  Synthetic: descartes_1546_CREBBP
ggggctgctgatctgttgtt

SEQ ID NO: 5634 - DNA, 20 bp, Artificial Sequence
  Synthetic: descartes_1547_CREBBP
tctgctaataagtgataata

SEQ ID NO: 5635 - DNA, 20 bp, Artificial Sequence
  Synthetic: descartes_1548_CREBBP
cccacagactttgtgctgct

SEQ ID NO: 5636 - DNA, 20 bp, Artificial Sequence
  Synthetic: descartes_1549_CREBBP
caaggagcttcccaagttaa

SEQ ID NO: 5637 - DNA, 20 bp, Artificial Sequence
  Synthetic: descartes_1550_CRLF1
gcttgaaagaggaaatcctt

SEQ ID NO: 5638 - DNA, 20 bp, Artificial Sequence
  Synthetic: descartes_1551_CRLF1
aagccaaataccagatccgc

SEQ ID NO: 5639 - DNA, 20 bp, Artificial Sequence
  Synthetic: descartes_1552_CRLF1
ctctttcaagccaaatacca

SEQ ID NO: 5640 - DNA, 20 bp, Artificial Sequence
  Synthetic: descartes_1553_CRLF1
ttggagccatagatgccaaa

SEQ ID NO: 5641 - DNA, 20 bp, Artificial Sequence
  Synthetic: descartes_1554_CRLF1
gcatctatggctccaagaaa

SEQ ID NO: 5642 - DNA, 20 bp, Artificial Sequence
  Synthetic: descartes_1555_CRLF1
aggccggccaggcggcagga

SEQ ID NO: 5643 - DNA, 20 bp, Artificial Sequence
  Synthetic: descartes_1556_CRLF1
cgccctatgagatctgggtg

SEQ ID NO: 5644 - DNA, 20 bp, Artificial Sequence
  Synthetic: descartes_1557_CRP
agacccacccactgtaaaac

SEQ ID NO: 5645 - DNA, 20 bp, Artificial Sequence
  Synthetic: descartes_1558_CRP
gtctaaggatataggataca

SEQ ID NO: 5646 - DNA, 20 bp, Artificial Sequence
  Synthetic: descartes_1559_CRP
gtgaacacttcgccttgcac

SEQ ID NO: 5647 - DNA, 20 bp, Artificial Sequence
  Synthetic: descartes_1560_CRP
tcgtatgccaccaagagaca

SEQ ID NO: 5648 - DNA, 20 bp, Artificial Sequence
  Synthetic: descartes_1561_CRP
cagtgggtgggtctgaaata

SEQ ID NO: 5649 - DNA, 20 bp, Artificial Sequence
  Synthetic: descartes_1562_CRP
ccaaagagtcggatacttcc

SEQ ID NO: 5650 - DNA, 20 bp, Artificial Sequence
  Synthetic: descartes_1563_CRP
agggatacataggaagtatc

SEQ ID NO: 5651 - DNA, 20 bp, Artificial Sequence
  Synthetic: descartes_1564_CRP
caatgtctcccaccagggac

SEQ ID NO: 5652 - DNA, 20 bp, Artificial Sequence
  Synthetic: descartes_1565_CRTAM
agaacacacactagaaagtt

SEQ ID NO: 5653 - DNA, 20 bp, Artificial Sequence
  Synthetic: descartes_1566_CRTAM
tctccagagcatctgaagct

SEQ ID NO: 5654 - DNA, 20 bp, Artificial Sequence
  Synthetic: descartes_1567_CRTAM
gagtgagcgtctggccttcc

SEQ ID NO: 5655 - DNA, 20 bp, Artificial Sequence
  Synthetic: descartes_1568_CRTAM
ccctttcctagttactgatg

SEQ ID NO: 5656 - DNA, 20 bp, Artificial Sequence
  Synthetic: descartes_1569_CRTAM
ccataagtgtggattatgag

SEQ ID NO: 5657 - DNA, 20 bp, Artificial Sequence
  Synthetic: descartes_1570_CRTAM
tcttcagatgatgtttcttc

SEQ ID NO: 5658 - DNA, 20 bp, Artificial Sequence
  Synthetic: descartes_1571_CRTAM
ggactggcaagaaagaaaag

SEQ ID NO: 5659 - DNA, 20 bp, Artificial Sequence
  Synthetic: descartes_1572_CRTAM
ctagttactgatgaagagac

SEQ ID NO: 5660 - DNA, 20 bp, Artificial Sequence
  Synthetic: descartes_1573_CSK
atgaggcgcgtacagagtcc

SEQ ID NO: 5661 - DNA, 20 bp, Artificial Sequence
  Synthetic: descartes_1574_CSK
ccagagaaggattccgaaac

SEQ ID NO: 5662 - DNA, 20 bp, Artificial Sequence
  Synthetic: descartes_1575_CSK
gtacccgccttcacgccctc

SEQ ID NO: 5663 - DNA, 20 bp, Artificial Sequence
  Synthetic: descartes_1576_CSK
ggaatccttctctgggaaat

SEQ ID NO: 5664 - DNA, 20 bp, Artificial Sequence
  Synthetic: descartes_1577_CSK
gtctcaccaaggaggcgtcc

SEQ ID NO: 5665 - DNA, 20 bp, Artificial Sequence
  Synthetic: descartes_1578_CSK
ggcgagtgccttatccaaga

SEQ ID NO: 5666 - DNA, 20 bp, Artificial Sequence
  Synthetic: descartes_1579_CSK
gtgcatcgagacctggctgc

SEQ ID NO: 5667 - DNA, 20 bp, Artificial Sequence
  Synthetic: descartes_1580_CSK
atgtgctcaagctgctctcg

SEQ ID NO: 5668 - DNA, 20 bp, Artificial Sequence
  Synthetic: descartes_1581_CTLA4
cctggagatgcatactcaca

SEQ ID NO: 5669 - DNA, 20 bp, Artificial Sequence
  Synthetic: descartes_1582_CTLA4
acatagacccctgttgtaag

SEQ ID NO: 5670 - DNA, 20 bp, Artificial Sequence
  Synthetic: descartes_1583_CTLA4
tgtgtgagtatgcatctcca

SEQ ID NO: 5671 - DNA, 20 bp, Artificial Sequence
  Synthetic: descartes_1584_CTLA4
agcggcacaaggctcagctg

SEQ ID NO: 5672 - DNA, 20 bp, Artificial Sequence
  Synthetic: descartes_1585_CTLA4
ttctcttcatccctgtcttc

SEQ ID NO: 5673 - DNA, 20 bp, Artificial Sequence
  Synthetic: descartes_1586_CTLA4
ctcaaagaaacagctgtgag

SEQ ID NO: 5674 - DNA, 20 bp, Artificial Sequence
  Synthetic: descartes_1587_CTLA4
cactggaggtgcccgtgcag

SEQ ID NO: 5675 - DNA, 20 bp, Artificial Sequence
  Synthetic: descartes_1588_CTLA4
cagaagacagggatgaagag

SEQ ID NO: 5676 - DNA, 20 bp, Artificial Sequence
  Synthetic: descartes_1589_CTNNB1
gctgaaccatcacagatgct

SEQ ID NO: 5677 - DNA, 20 bp, Artificial Sequence
  Synthetic: descartes_1590_CTNNB1
gcttatggcaaccaagaaag

SEQ ID NO: 5678 - DNA, 20 bp, Artificial Sequence
  Synthetic: descartes_1591_CTNNB1
gctggtgggctgcagaaaat

SEQ ID NO: 5679 - DNA, 20 bp, Artificial Sequence
  Synthetic: descartes_1592_CTNNB1
accagggcaggaatgcctcc

SEQ ID NO: 5680 - DNA, 20 bp, Artificial Sequence
  Synthetic: descartes_1593_CTNNB1
gtaagtataggtcctcatta

SEQ ID NO: 5681 - DNA, 20 bp, Artificial Sequence
  Synthetic: descartes_1594_CTNNB1
agttgagctgaccagctctc

SEQ ID NO: 5682 - DNA, 20 bp, Artificial Sequence
  Synthetic: descartes_1595_CTNNB1
gctccttcttgatgtaataa

SEQ ID NO: 5683 - DNA, 20 bp, Artificial Sequence
  Synthetic: descartes_1596_CTNNB1
gttgcagcatctgaaagatt

SEQ ID NO: 5684 - DNA, 20 bp, Artificial Sequence
  Synthetic: descartes_1597_CTPS1
gtgttcgaggaacagaagga

SEQ ID NO: 5685 - DNA, 20 bp, Artificial Sequence
  Synthetic: descartes_1598_CTPS1
catgtaacttcaatcaaaat

SEQ ID NO: 5686 - DNA, 20 bp, Artificial Sequence
  Synthetic: descartes_1599_CTPS1
attgaagttacatgtaaacc

SEQ ID NO: 5687 - DNA, 20 bp, Artificial Sequence
  Synthetic: descartes_1600_CTPS1
cttctgttcctcgaacacca

SEQ ID NO: 5688 - DNA, 20 bp, Artificial Sequence
  Synthetic: descartes_1601_CTPS1
tatgtcccccacggttccac

SEQ ID NO: 5689 - DNA, 20 bp, Artificial Sequence
  Synthetic: descartes_1602_CTPS1
accctacgaccagtcatccc

SEQ ID NO: 5690 - DNA, 20 bp, Artificial Sequence
  Synthetic: descartes_1603_CTPS1
tccttcactgatgtgtcaag

SEQ ID NO: 5691 - DNA, 20 bp, Artificial Sequence
  Synthetic: descartes_1604_CTPS1
cccaagtaatctcctttccg

SEQ ID NO: 5692 - DNA, 20 bp, Artificial Sequence
  Synthetic: descartes_1605_CTSC
gactgtggccaccacttctc

SEQ ID NO: 5693 - DNA, 20 bp, Artificial Sequence
  Synthetic: descartes_1606_CTSC
gaacaggactgacaaaattg

SEQ ID NO: 5694 - DNA, 20 bp, Artificial Sequence
  Synthetic: descartes_1607_CTSC
acaatccagtaatccatccc

SEQ ID NO: 5695 - DNA, 20 bp, Artificial Sequence
  Synthetic: descartes_1608_CTSC
ggctggtggaagaagcttgc

SEQ ID NO: 5696 - DNA, 20 bp, Artificial Sequence
  Synthetic: descartes_1609_CTSC
tagtggaggaagtcatcata

SEQ ID NO: 5697 - DNA, 20 bp, Artificial Sequence
  Synthetic: descartes_1610_CTSC
tatggaggctgcaatgaagc

SEQ ID NO: 5698 - DNA, 20 bp, Artificial Sequence
  Synthetic: descartes_1611_CTSC
accggaaagaaggtgggaac

SEQ ID NO: 5699 - DNA, 20 bp, Artificial Sequence
  Synthetic: descartes_1612_CTSC
catggagaatcagtgcctgt

SEQ ID NO: 5700 - DNA, 20 bp, Artificial Sequence
  Synthetic: descartes_1613_CTSH
tccatacccaacagccagta

SEQ ID NO: 5701 - DNA, 20 bp, Artificial Sequence
  Synthetic: descartes_1614_CTSH
ccagcaactggaggaagata

SEQ ID NO: 5702 - DNA, 20 bp, Artificial Sequence
  Synthetic: descartes_1615_CTSH
acttcaagtcatggatgtct

SEQ ID NO: 5703 - DNA, 20 bp, Artificial Sequence
  Synthetic: descartes_1616_CTSH
acgatccagtaagggatccc

SEQ ID NO: 5704 - DNA, 20 bp, Artificial Sequence
  Synthetic: descartes_1617_CTSH
gagtatatcctgtacaacaa

SEQ ID NO: 5705 - DNA, 20 bp, Artificial Sequence
  Synthetic: descartes_1618_CTSH
agacatgagctttgctgaaa

SEQ ID NO: 5706 - DNA, 20 bp, Artificial Sequence
  Synthetic: descartes_1619_CTSH
acaggtgagacaaaatttcc

SEQ ID NO: 5707 - DNA, 20 bp, Artificial Sequence
  Synthetic: descartes_1620_CTSH
aatgtgtggttcccattgtt

SEQ ID NO: 5708 - DNA, 20 bp, Artificial Sequence
  Synthetic: descartes_1621_CTSL
aaagcacagaatcagataac

SEQ ID NO: 5709 - DNA, 20 bp, Artificial Sequence
  Synthetic: descartes_1622_CTSL
gaggcacagtggaccaagtg

SEQ ID NO: 5710 - DNA, 20 bp, Artificial Sequence
  Synthetic: descartes_1623_CTSL
ccttccctgtattcctgatt

SEQ ID NO: 5711 - DNA, 20 bp, Artificial Sequence
  Synthetic: descartes_1624_CTSL
gtgctactggtgctcttgaa

SEQ ID NO: 5712 - DNA, 20 bp, Artificial Sequence
  Synthetic: descartes_1625_CTSL
agccagactgtagcagtgaa

SEQ ID NO: 5713 - DNA, 20 bp, Artificial Sequence
  Synthetic: descartes_1626_CTSL
cctgggaattgcctcagcta

SEQ ID NO: 5714 - DNA, 20 bp, Artificial Sequence
  Synthetic: descartes_1627_CTSL
tgaggcccccagatctgtgg

SEQ ID NO: 5715 - DNA, 20 bp, Artificial Sequence
  Synthetic: descartes_1628_CTSL
cggaacatctgtccttcaag

SEQ ID NO: 5716 - DNA, 20 bp, Artificial Sequence
  Synthetic: descartes_1629_CTSS
agttgagcaatccaccaggt

SEQ ID NO: 5717 - DNA, 20 bp, Artificial Sequence
  Synthetic: descartes_1630_CTSS
acttcagtaacacacccttt

SEQ ID NO: 5718 - DNA, 20 bp, Artificial Sequence
  Synthetic: descartes_1631_CTSS
ccattaagatcaccatagcc

SEQ ID NO: 5719 - DNA, 20 bp, Artificial Sequence
  Synthetic: descartes_1632_CTSS
ccagatgagacgtcgtactg

SEQ ID NO: 5720 - DNA, 20 bp, Artificial Sequence
  Synthetic: descartes_1633_CTSS
tctgccactggctgggaact

SEQ ID NO: 5721 - DNA, 20 bp, Artificial Sequence
  Synthetic: descartes_1634_CTSS
tgggtaagagggaaagctag

SEQ ID NO: 5722 - DNA, 20 bp, Artificial Sequence
  Synthetic: descartes_1635_CTSS
tctctccagtccacagaatc

SEQ ID NO: 5723 - DNA, 20 bp, Artificial Sequence
  Synthetic: descartes_1636_CTSS
aggacatcttctctgccata

SEQ ID NO: 5724 - DNA, 20 bp, Artificial Sequence
  Synthetic: descartes_1637_CXCL13
tcttaaacactggaactggt

SEQ ID NO: 5725 - DNA, 20 bp, Artificial Sequence
  Synthetic: descartes_1638_CXCL13
tccctagacgcttcattgat

SEQ ID NO: 5726 - DNA, 20 bp, Artificial Sequence
  Synthetic: descartes_1639_CXCL13
tcaatacttccatcattctt

SEQ ID NO: 5727 - DNA, 20 bp, Artificial Sequence
  Synthetic: descartes_1640_CXCL13
aattcgatcaatgaagcgtc

SEQ ID NO: 5728 - DNA, 20 bp, Artificial Sequence
  Synthetic: descartes_1641_CXCL13
ttggacaaccattcccacgg

SEQ ID NO: 5729 - DNA, 20 bp, Artificial Sequence
  Synthetic: descartes_1642_CXCL13
tatccattcagcttgagggt

SEQ ID NO: 5730 - DNA, 20 bp, Artificial Sequence
  Synthetic: descartes_1643_CXCL13
ttttcttggacaaccattcc

SEQ ID NO: 5731 - DNA, 20 bp, Artificial Sequence
  Synthetic: descartes_1644_CXCR4
gctccaaggaaagcatagag

SEQ ID NO: 5732 - DNA, 20 bp, Artificial Sequence
  Synthetic: descartes_1645_CXCR4
caggaggatgaaggagtcga

SEQ ID NO: 5733 - DNA, 20 bp, Artificial Sequence
  Synthetic: descartes_1646_CXCR4
ccacggcatcaactgcccag

SEQ ID NO: 5734 - DNA, 20 bp, Artificial Sequence
  Synthetic: descartes_1647_CXCR4
cactgagtctgagtcttcaa

SEQ ID NO: 5735 - DNA, 20 bp, Artificial Sequence
  Synthetic: descartes_1648_CXCR4
cgtgaagaaaatgctaattt

SEQ ID NO: 5736 - DNA, 20 bp, Artificial Sequence
  Synthetic: descartes_1649_CXCR4
agcacatcatggttggcctt

SEQ ID NO: 5737 - DNA, 20 bp, Artificial Sequence
  Synthetic: descartes_1650_CXCR4
agccaacagcttccttggcc

SEQ ID NO: 5738 - DNA, 20 bp, Artificial Sequence
  Synthetic: descartes_1651_CXCR4
cagatatacacttcagataa

SEQ ID NO: 5739 - DNA, 20 bp, Artificial Sequence
  Synthetic: descartes_1652_CXXC1
ctgtgggcaccccatcaacc

SEQ ID NO: 5740 - DNA, 20 bp, Artificial Sequence
  Synthetic: descartes_1653_CXXC1
ctctgaggattatacacatc

SEQ ID NO: 5741 - DNA, 20 bp, Artificial Sequence
  Synthetic: descartes_1654_CXXC1
ggtccatgtaccccacacgc

SEQ ID NO: 5742 - DNA, 20 bp, Artificial Sequence
  Synthetic: descartes_1655_CXXC1
tgtcgggacatgaagaagtt

SEQ ID NO: 5743 - DNA, 20 bp, Artificial Sequence
  Synthetic: descartes_1656_CXXC1
actgccctcttccgcagcgc

SEQ ID NO: 5744 - DNA, 20 bp, Artificial Sequence
  Synthetic: descartes_1657_CXXC1
ctgaaggcgagtgcgggcac

SEQ ID NO: 5745 - DNA, 20 bp, Artificial Sequence
  Synthetic: descartes_1658_CXXC1
agcaggagcgcaatgtgcgc

SEQ ID NO: 5746 - DNA, 20 bp, Artificial Sequence
  Synthetic: descartes_1659_CXXC1
tggggcgaagcagagccccg

SEQ ID NO: 5747 - DNA, 20 bp, Artificial Sequence
  Synthetic: descartes_1660_CYLD
ctggcaaaacatcacagaat

SEQ ID NO: 5748 - DNA, 20 bp, Artificial Sequence
  Synthetic: descartes_1661_CYLD
gcaaaggttctacccttaaa

SEQ ID NO: 5749 - DNA, 20 bp, Artificial Sequence
  Synthetic: descartes_1662_CYLD
agggtagaacctttgctaaa

SEQ ID NO: 5750 - DNA, 20 bp, Artificial Sequence
  Synthetic: descartes_1663_CYLD
actataatattctacatcgt

SEQ ID NO: 5751 - DNA, 20 bp, Artificial Sequence
  Synthetic: descartes_1664_CYLD
ccaggaaaagaaagcttagg

SEQ ID NO: 5752 - DNA, 20 bp, Artificial Sequence
  Synthetic: descartes_1665_CYLD
ccttggtacaccccgtcagt

SEQ ID NO: 5753 - DNA, 20 bp, Artificial Sequence
  Synthetic: descartes_1666_CYLD
acaggacagcccacgtctat

SEQ ID NO: 5754 - DNA, 20 bp, Artificial Sequence
  Synthetic: descartes_1667_CYLD
ggtctaagtaacacagtgtc

SEQ ID NO: 5755 - DNA, 20 bp, Artificial Sequence
  Synthetic: descartes_1668_CYP4V2
gagggggcagagcccctgcc

SEQ ID NO: 5756 - DNA, 20 bp, Artificial Sequence
  Synthetic: descartes_1669_CYP4V2
gatagaatccaaccagaaaa

SEQ ID NO: 5757 - DNA, 20 bp, Artificial Sequence
  Synthetic: descartes_1670_CYP4V2
agtgtgactgatgacgaagg

SEQ ID NO: 5758 - DNA, 20 bp, Artificial Sequence
  Synthetic: descartes_1671_CYP4V2
aagaaggatgggaacacaaa

SEQ ID NO: 5759 - DNA, 20 bp, Artificial Sequence
  Synthetic: descartes_1672_CYP4V2
ctgtgatggaagaaaagacc

SEQ ID NO: 5760 - DNA, 20 bp, Artificial Sequence
  Synthetic: descartes_1673_CYP4V2
gcttgatctctggtacctta

SEQ ID NO: 5761 - DNA, 20 bp, Artificial Sequence
  Synthetic: descartes_1674_CYP4V2
actagttcaaagcaaattga

SEQ ID NO: 5762 - DNA, 20 bp, Artificial Sequence
  Synthetic: descartes_1675_CYP4V2
agcagatcattgagtacaca

SEQ ID NO: 5763 - DNA, 20 bp, Artificial Sequence
  Synthetic: descartes_1676_DBNL
cctatgaaggcaacagcaat

SEQ ID NO: 5764 - DNA, 20 bp, Artificial Sequence
  Synthetic: descartes_1677_DBNL
gcagagagccagctgctgcc

SEQ ID NO: 5765 - DNA, 20 bp, Artificial Sequence
  Synthetic: descartes_1678_DBNL
gcatgttccctgccaactac

SEQ ID NO: 5766 - DNA, 20 bp, Artificial Sequence
  Synthetic: descartes_1679_DBNL
atctcagacacggcattggt

SEQ ID NO: 5767 - DNA, 20 bp, Artificial Sequence
  Synthetic: descartes_1680_DBNL
ggttccttgaaaccacttct

SEQ ID NO: 5768 - DNA, 20 bp, Artificial Sequence
  Synthetic: descartes_1681_DBNL
gcccagaagctgtctttacc

SEQ ID NO: 5769 - DNA, 20 bp, Artificial Sequence
  Synthetic: descartes_1682_DBNL
ctccagccgacggttctcct

SEQ ID NO: 5770 - DNA, 20 bp, Artificial Sequence
  Synthetic: descartes_1683_DBNL
acaaggagagtggccgcttc

SEQ ID NO: 5771 - DNA, 20 bp, Artificial Sequence
  Synthetic: descartes_1684_DCLRE1C
agtggagcaaattaccctgt

SEQ ID NO: 5772 - DNA, 20 bp, Artificial Sequence
  Synthetic: descartes_1685_DCLRE1C
gagaaaggagcagaaaaaca

SEQ ID NO: 5773 - DNA, 20 bp, Artificial Sequence
  Synthetic: descartes_1686_DCLRE1C
agtgactctgatggagaatc

SEQ ID NO: 5774 - DNA, 20 bp, Artificial Sequence
  Synthetic: descartes_1687_DCLRE1C
actgctatactctcaccagt

SEQ ID NO: 5775 - DNA, 20 bp, Artificial Sequence
  Synthetic: descartes_1688_DCLRE1C
ggaacatgcctgagatcctt

SEQ ID NO: 5776 - DNA, 20 bp, Artificial Sequence
  Synthetic: descartes_1689_DCLRE1C
aatgactgcagtatcagaaa

SEQ ID NO: 5777 - DNA, 20 bp, Artificial Sequence
  Synthetic: descartes_1690_DCLRE1C
tgatactgcagtcattgaaa

SEQ ID NO: 5778 - DNA, 20 bp, Artificial Sequence
  Synthetic: descartes_1691_DCLRE1C
gatactacgttctgtgatcc

SEQ ID NO: 5779 - DNA, 20 bp, Artificial Sequence
  Synthetic: descartes_1692_DDIT4
gctccgccaactctcccttc

SEQ ID NO: 5780 - DNA, 20 bp, Artificial Sequence
  Synthetic: descartes_1693_DDIT4
accgctccacgagcctggag

SEQ ID NO: 5781 - DNA, 20 bp, Artificial Sequence
  Synthetic: descartes_1694_DDIT4
cccacctggcttaccaactg

SEQ ID NO: 5782 - DNA, 20 bp, Artificial Sequence
  Synthetic: descartes_1695_DDIT4
ggaccgcttctcgtcgtcgt

SEQ ID NO: 5783 - DNA, 20 bp, Artificial Sequence
  Synthetic: descartes_1696_DENND1B
acataacaacatcttccaat

SEQ ID NO: 5784 - DNA, 20 bp, Artificial Sequence
  Synthetic: descartes_1697_DENND1B
aatgaaactctcagatcact

SEQ ID NO: 5785 - DNA, 20 bp, Artificial Sequence
  Synthetic: descartes_1698_DENND1B
acctgagtaaggagtcttca

SEQ ID NO: 5786 - DNA, 20 bp, Artificial Sequence
  Synthetic: descartes_1699_DENND1B
ccagactgataaaggaaaaa

SEQ ID NO: 5787 - DNA, 20 bp, Artificial Sequence
  Synthetic: descartes_1700_DENND1B
cctccacaaaagccacctga

SEQ ID NO: 5788 - DNA, 20 bp, Artificial Sequence
  Synthetic: descartes_1701_DENND1B
tcctgaaagaggaaaacagt

SEQ ID NO: 5789 - DNA, 20 bp, Artificial Sequence
  Synthetic: descartes_1702_DENND1B
gatcctacagagatgcactg

SEQ ID NO: 5790 - DNA, 20 bp, Artificial Sequence
  Synthetic: descartes_1703_DENND1B
agatgatctgcttatacccg

SEQ ID NO: 5791 - DNA, 20 bp, Artificial Sequence
  Synthetic: descartes_1704_DENND5A
gtcacaggagtgtcttcacc

SEQ ID NO: 5792 - DNA, 20 bp, Artificial Sequence
  Synthetic: descartes_1705_DENND5A
gcatacagcccagagttatc

SEQ ID NO: 5793 - DNA, 20 bp, Artificial Sequence
  Synthetic: descartes_1706_DENND5A
ccagacgcagctcaattgct

SEQ ID NO: 5794 - DNA, 20 bp, Artificial Sequence
  Synthetic: descartes_1707_DENND5A
acttgtagtccatgactcca

SEQ ID NO: 5795 - DNA, 20 bp, Artificial Sequence
  Synthetic: descartes_1708_DENND5A
tgaagaggtgactagcaagc

SEQ ID NO: 5796 - DNA, 20 bp, Artificial Sequence
  Synthetic: descartes_1709_DENND5A
ccaacagggagcaaatgcaa

SEQ ID NO: 5797 - DNA, 20 bp, Artificial Sequence
  Synthetic: descartes_1710_DENND5A
catggacagtcgcacccatg

SEQ ID NO: 5798 - DNA, 20 bp, Artificial Sequence
  Synthetic: descartes_1711_DENND5A
gctggtaaatcctgagttct

SEQ ID NO: 5799 - DNA, 20 bp, Artificial Sequence
  Synthetic: descartes_1712_DHPS
ctgggatatacatccaacct

SEQ ID NO: 5800 - DNA, 20 bp, Artificial Sequence
  Synthetic: descartes_1713_DHPS
gtcccgcacttacagacggc

SEQ ID NO: 5801 - DNA, 20 bp, Artificial Sequence
  Synthetic: descartes_1714_DHPS
gcctcagggggaaggagctc

SEQ ID NO: 5802 - DNA, 20 bp, Artificial Sequence
  Synthetic: descartes_1715_DHPS
atggctctgactcaggtgcc

SEQ ID NO: 5803 - DNA, 20 bp, Artificial Sequence
  Synthetic: descartes_1716_DHPS
catcaacacagcccaggagt

SEQ ID NO: 5804 - DNA, 20 bp, Artificial Sequence
  Synthetic: descartes_1717_DHPS
cccagaagatggatgccttc

SEQ ID NO: 5805 - DNA, 20 bp, Artificial Sequence
  Synthetic: descartes_1718_DHPS
ccaagtgcactgggatgatc

SEQ ID NO: 5806 - DNA, 20 bp, Artificial Sequence
  Synthetic: descartes_1719_DHPS
agccacaagcagggggaaga

SEQ ID NO: 5807 - DNA, 20 bp, Artificial Sequence
  Synthetic: descartes_1720_DIDO1
gaaggaccactatcgccaag

SEQ ID NO: 5808 - DNA, 20 bp, Artificial Sequence
  Synthetic: descartes_1721_DIDO1
gtgggagccgtaaggaagcc

SEQ ID NO: 5809 - DNA, 20 bp, Artificial Sequence
  Synthetic: descartes_1722_DIDO1
gctgcgatggtgcagcactc

SEQ ID NO: 5810 - DNA, 20 bp, Artificial Sequence
  Synthetic: descartes_1723_DIDO1
gcagattactaacccaagaa

SEQ ID NO: 5811 - DNA, 20 bp, Artificial Sequence
  Synthetic: descartes_1724_DIDO1
gaggtcagagaggaccaccc

SEQ ID NO: 5812 - DNA, 20 bp, Artificial Sequence
  Synthetic: descartes_1725_DIDO1
cagaagagaatatcgcttct

SEQ ID NO: 5813 - DNA, 20 bp, Artificial Sequence
  Synthetic: descartes_1726_DIDO1
ccacactctgcatgttaata

SEQ ID NO: 5814 - DNA, 20 bp, Artificial Sequence
  Synthetic: descartes_1727_DIDO1
ggattatgttggcaaactca

SEQ ID NO: 5815 - DNA, 20 bp, Artificial Sequence
  Synthetic: descartes_1728_DLG1
catacaagcgtacaatagac

SEQ ID NO: 5816 - DNA, 20 bp, Artificial Sequence
  Synthetic: descartes_1729_DLG1
actcgaagacacagctttat

SEQ ID NO: 5817 - DNA, 20 bp, Artificial Sequence
  Synthetic: descartes_1730_DLG1
ctgggaatcactccgacctc

SEQ ID NO: 5818 - DNA, 20 bp, Artificial Sequence
  Synthetic: descartes_1731_DLG1
gaagaagttactcatgaaga

SEQ ID NO: 5819 - DNA, 20 bp, Artificial Sequence
  Synthetic: descartes_1732_DLG1
aatgcagctgctgcctgctc

SEQ ID NO: 5820 - DNA, 20 bp, Artificial Sequence
  Synthetic: descartes_1733_DLG1
gagatatcctccatgttatt

SEQ ID NO: 5821 - DNA, 20 bp, Artificial Sequence
  Synthetic: descartes_1734_DLG1
gaggaatatcgttcaaaact

SEQ ID NO: 5822 - DNA, 20 bp, Artificial Sequence
  Synthetic: descartes_1735_DLG1
gattatccagtaaggtcact

SEQ ID NO: 5823 - DNA, 20 bp, Artificial Sequence
  Synthetic: descartes_1736_DLG5
ggaggaaacacaagcacaaa

SEQ ID NO: 5824 - DNA, 20 bp, Artificial Sequence
  Synthetic: descartes_1737_DLG5
gatgtgaccactgtggcgtc

SEQ ID NO: 5825 - DNA, 20 bp, Artificial Sequence
  Synthetic: descartes_1738_DLG5
cagtgactccattccactct

SEQ ID NO: 5826 - DNA, 20 bp, Artificial Sequence
  Synthetic: descartes_1739_DLG5
gctcccgcagcagctgccca

SEQ ID NO: 5827 - DNA, 20 bp, Artificial Sequence
  Synthetic: descartes_1740_DLG5
gtgacaaatatgccacagtc

SEQ ID NO: 5828 - DNA, 20 bp, Artificial Sequence
  Synthetic: descartes_1741_DLG5
ggccgaagcttgctccagta

SEQ ID NO: 5829 - DNA, 20 bp, Artificial Sequence
  Synthetic: descartes_1742_DLG5
atatggcagaaggtgtgaat

SEQ ID NO: 5830 - DNA, 20 bp, Artificial Sequence
  Synthetic: descartes_1743_DLG5
aaaatatcaaagactctgat

SEQ ID NO: 5831 - DNA, 20 bp, Artificial Sequence
  Synthetic: descartes_1744_DMRTC2
gctgcgcctcctgctgccta

SEQ ID NO: 5832 - DNA, 20 bp, Artificial Sequence
  Synthetic: descartes_1745_DMRTC2
ggagaggcttcccctctcct

SEQ ID NO: 5833 - DNA, 20 bp, Artificial Sequence
  Synthetic: descartes_1746_DMRTC2
tggagagccccaagggcccc

SEQ ID NO: 5834 - DNA, 20 bp, Artificial Sequence
  Synthetic: descartes_1747_DMRTC2
accctggcacctccctccag

SEQ ID NO: 5835 - DNA, 20 bp, Artificial Sequence
  Synthetic: descartes_1748_DMRTC2
agccccacgagggcttcagc

SEQ ID NO: 5836 - DNA, 20 bp, Artificial Sequence
  Synthetic: descartes_1749_DMRTC2
tgacactcgcaagcctggaa

SEQ ID NO: 5837 - DNA, 20 bp, Artificial Sequence
  Synthetic: descartes_1750_DMRTC2
tgaagtggttgggagctttg

SEQ ID NO: 5838 - DNA, 20 bp, Artificial Sequence
  Synthetic: descartes_1751_DNAH12
gacagaacactgggtaaaag

SEQ ID NO: 5839 - DNA, 20 bp, Artificial Sequence
  Synthetic: descartes_1752_DNAH12
gtggaacgaatagccgaagc

SEQ ID NO: 5840 - DNA, 20 bp, Artificial Sequence
  Synthetic: descartes_1753_DNAH12
actggtggtttcacaagaac

SEQ ID NO: 5841 - DNA, 20 bp, Artificial Sequence
  Synthetic: descartes_1754_DNAH12
tatgaagcaatgtgtagaaa

SEQ ID NO: 5842 - DNA, 20 bp, Artificial Sequence
  Synthetic: descartes_1755_DNAH12
aaagtcacttgacacctcat

SEQ ID NO: 5843 - DNA, 20 bp, Artificial Sequence
  Synthetic: descartes_1756_DNAH12
caaatccttctacagttctc

SEQ ID NO: 5844 - DNA, 20 bp, Artificial Sequence
  Synthetic: descartes_1757_DNAH12
agtgattcacagtcaattgg

SEQ ID NO: 5845 - DNA, 20 bp, Artificial Sequence
  Synthetic: descartes_1758_DNAH12
cccagtgttctgtctaaatt

SEQ ID NO: 5846 - DNA, 20 bp, Artificial Sequence
  Synthetic: descartes_1759_DNAJA3
gaggcactcctaatatctga

SEQ ID NO: 5847 - DNA, 20 bp, Artificial Sequence
  Synthetic: descartes_1760_DNAJA3
gaaaggaatccctcctcgtc

SEQ ID NO: 5848 - DNA, 20 bp, Artificial Sequence
  Synthetic: descartes_1761_DNAJA3
ccacaggcatcctcacggtc

SEQ ID NO: 5849 - DNA, 20 bp, Artificial Sequence
  Synthetic: descartes_1762_DNAJA3
agtgatgaggtgaagaggaa

SEQ ID NO: 5850 - DNA, 20 bp, Artificial Sequence
  Synthetic: descartes_1763_DNAJA3
tgcttggcttgtcctgctcc

SEQ ID NO: 5851 - DNA, 20 bp, Artificial Sequence
  Synthetic: descartes_1764_DNAJA3
ccacccatccgaatcttctg

SEQ ID NO: 5852 - DNA, 20 bp, Artificial Sequence
  Synthetic: descartes_1765_DNAJA3
gccaaagaagattattatca

SEQ ID NO: 5853 - DNA, 20 bp, Artificial Sequence
  Synthetic: descartes_1766_DNAJA3
tactgcctccttccacacga

SEQ ID NO: 5854 - DNA, 20 bp, Artificial Sequence
  Synthetic: descartes_1767_DND1
accatggtacctgcctcagc

SEQ ID NO: 5855 - DNA, 20 bp, Artificial Sequence
  Synthetic: descartes_1768_DND1
ggcataggacctgctggctg

SEQ ID NO: 5856 - DNA, 20 bp, Artificial Sequence
  Synthetic: descartes_1769_DND1
gcaagggacaagttagggtt

SEQ ID NO: 5857 - DNA, 20 bp, Artificial Sequence
  Synthetic: descartes_1770_DND1
gccatggcagcggcccggtg

SEQ ID NO: 5858 - DNA, 20 bp, Artificial Sequence
  Synthetic: descartes_1771_DND1
agcagagcgatctgcccggg

SEQ ID NO: 5859 - DNA, 20 bp, Artificial Sequence
  Synthetic: descartes_1772_DNMT3A
agtgcaccataagatgtcct

SEQ ID NO: 5860 - DNA, 20 bp, Artificial Sequence
  Synthetic: descartes_1773_DNMT3A
ccagtccactatactgacgt

SEQ ID NO: 5861 - DNA, 20 bp, Artificial Sequence
  Synthetic: descartes_1774_DNMT3A
ccccacaccagctccccaat

SEQ ID NO: 5862 - DNA, 20 bp, Artificial Sequence
  Synthetic: descartes_1775_DNMT3A
cccacctgtcccagctgaga

SEQ ID NO: 5863 - DNA, 20 bp, Artificial Sequence
  Synthetic: descartes_1776_DNMT3A
gctggtggaggtggtgcgta

SEQ ID NO: 5864 - DNA, 20 bp, Artificial Sequence
  Synthetic: descartes_1777_DNMT3A
ccgtctccgaaccacatgac

SEQ ID NO: 5865 - DNA, 20 bp, Artificial Sequence
  Synthetic: descartes_1778_DNMT3A
gtttcccagtccactatact

SEQ ID NO: 5866 - DNA, 20 bp, Artificial Sequence
  Synthetic: descartes_1779_DNMT3A
atggattcgatgttggtctc

SEQ ID NO: 5867 - DNA, 20 bp, Artificial Sequence
  Synthetic: descartes_1780_DNMT3B
catgtatgatgacgatggct

SEQ ID NO: 5868 - DNA, 20 bp, Artificial Sequence
  Synthetic: descartes_1781_DNMT3B
gataggagacgagcttattg

SEQ ID NO: 5869 - DNA, 20 bp, Artificial Sequence
  Synthetic: descartes_1782_DNMT3B
cctgttgtcatgaatggcaa

SEQ ID NO: 5870 - DNA, 20 bp, Artificial Sequence
  Synthetic: descartes_1783_DNMT3B
ccacctgctgaattactcac

SEQ ID NO: 5871 - DNA, 20 bp, Artificial Sequence
  Synthetic: descartes_1784_DNMT3B
ccggaagagctttggcatga

SEQ ID NO: 5872 - DNA, 20 bp, Artificial Sequence
  Synthetic: descartes_1785_DNMT3B
ctgtgcactacacagacgtg

SEQ ID NO: 5873 - DNA, 20 bp, Artificial Sequence
  Synthetic: descartes_1786_DNMT3B
ctactgcctgcacgacgcac

SEQ ID NO: 5874 - DNA, 20 bp, Artificial Sequence
  Synthetic: descartes_1787_DNMT3B
cccacacgaggtcccctatt

SEQ ID NO: 5875 - DNA, 20 bp, Artificial Sequence
  Synthetic: descartes_1788_DOCK2
acaggagggatgcaggtgta

SEQ ID NO: 5876 - DNA, 20 bp, Artificial Sequence
  Synthetic: descartes_1789_DOCK2
tccaggatactctggatgcc

SEQ ID NO: 5877 - DNA, 20 bp, Artificial Sequence
  Synthetic: descartes_1790_DOCK2
agatggctgtcatacatgcc

SEQ ID NO: 5878 - DNA, 20 bp, Artificial Sequence
  Synthetic: descartes_1791_DOCK2
ccagccagtccatgcctacc

SEQ ID NO: 5879 - DNA, 20 bp, Artificial Sequence
  Synthetic: descartes_1792_DOCK2
tatggcattctccagaggac

SEQ ID NO: 5880 - DNA, 20 bp, Artificial Sequence
  Synthetic: descartes_1793_DOCK2
aagaggttgctctggactat

SEQ ID NO: 5881 - DNA, 20 bp, Artificial Sequence
  Synthetic: descartes_1794_DOCK2
tccaggtgcagtccatgatg

SEQ ID NO: 5882 - DNA, 20 bp, Artificial Sequence
  Synthetic: descartes_1795_DOCK2
cccttgatgatgtctgttat

SEQ ID NO: 5883 - DNA, 20 bp, Artificial Sequence
  Synthetic: descartes_1796_DOCK3
ggctgtccagactgagcaca

SEQ ID NO: 5884 - DNA, 20 bp, Artificial Sequence
  Synthetic: descartes_1797_DOCK3
gatgataatacagagaagta

SEQ ID NO: 5885 - DNA, 20 bp, Artificial Sequence
  Synthetic: descartes_1798_DOCK3
gagagaggaggaaagagtgt

SEQ ID NO: 5886 - DNA, 20 bp, Artificial Sequence
  Synthetic: descartes_1799_DOCK3
gtagaggagagctgagtgga

SEQ ID NO: 5887 - DNA, 20 bp, Artificial Sequence
  Synthetic: descartes_1800_DOCK3
ggcctgcaagtgcatgtcac

SEQ ID NO: 5888 - DNA, 20 bp, Artificial Sequence
  Synthetic: descartes_1801_DOCK3
ataggggattggcaattaca

SEQ ID NO: 5889 - DNA, 20 bp, Artificial Sequence
  Synthetic: descartes_1802_DOCK3
tctgctcccagtccatcatg

SEQ ID NO: 5890 - DNA, 20 bp, Artificial Sequence
  Synthetic: descartes_1803_DOCK3
tggtaagactgaacaagaat

SEQ ID NO: 5891 - DNA, 20 bp, Artificial Sequence
  Synthetic: descartes_1804_DOCK8
gctgactacaaaagatcatc

SEQ ID NO: 5892 - DNA, 20 bp, Artificial Sequence
  Synthetic: descartes_1805_DOCK8
gtgggagagtaaactgtttc

SEQ ID NO: 5893 - DNA, 20 bp, Artificial Sequence
  Synthetic: descartes_1806_DOCK8
actgtgacctgaactctgac

SEQ ID NO: 5894 - DNA, 20 bp, Artificial Sequence
  Synthetic: descartes_1807_DOCK8
actgtgtcatataagatgct

SEQ ID NO: 5895 - DNA, 20 bp, Artificial Sequence
  Synthetic: descartes_1808_DOCK8
gctgaaattcctgctgatcc

SEQ ID NO: 5896 - DNA, 20 bp, Artificial Sequence
  Synthetic: descartes_1809_DOCK8
gtgggaagagcaccagactt

SEQ ID NO: 5897 - DNA, 20 bp, Artificial Sequence
  Synthetic: descartes_1810_DOCK8
cgaggtgaccacattaacaa

SEQ ID NO: 5898 - DNA, 20 bp, Artificial Sequence
  Synthetic: descartes_1811_DOCK8
atgatccagaggaagcagat

SEQ ID NO: 5899 - DNA, 20 bp, Artificial Sequence
  Synthetic: descartes_1812_DOT1L
gtgtcatagtcaattaaaac

SEQ ID NO: 5900 - DNA, 20 bp, Artificial Sequence
  Synthetic: descartes_1813_DOT1L
tagtctgaaaaacccaaaac

SEQ ID NO: 5901 - DNA, 20 bp, Artificial Sequence
  Synthetic: descartes_1814_DOT1L
ctgaaacagcctcctgatct

SEQ ID NO: 5902 - DNA, 20 bp, Artificial Sequence
  Synthetic: descartes_1815_DOT1L
agactagaaaaatagttttc

SEQ ID NO: 5903 - DNA, 20 bp, Artificial Sequence
  Synthetic: descartes_1816_DOT1L
atgagcagcatcgtgatgtt

SEQ ID NO: 5904 - DNA, 20 bp, Artificial Sequence
  Synthetic: descartes_1817_DOT1L
gagggagacggcttcttcac

SEQ ID NO: 5905 - DNA, 20 bp, Artificial Sequence
  Synthetic: descartes_1818_DOT1L
gggggagatttgctttctaa

SEQ ID NO: 5906 - DNA, 20 bp, Artificial Sequence
  Synthetic: descartes_1819_DOT1L
ctctcagaagagtggaggga

SEQ ID NO: 5907 - DNA, 20 bp, Artificial Sequence
  Synthetic: descartes_1820_DPF1
cggagacccccgatgccata

SEQ ID NO: 5908 - DNA, 20 bp, Artificial Sequence
  Synthetic: descartes_1821_DPF1
cacgtaccccgcccgctgtt

SEQ ID NO: 5909 - DNA, 20 bp, Artificial Sequence
  Synthetic: descartes_1822_DPF1
gccccgggacagatttacac

SEQ ID NO: 5910 - DNA, 20 bp, Artificial Sequence
  Synthetic: descartes_1823_DPF1
cgcatgacctcgaggtggaa

SEQ ID NO: 5911 - DNA, 20 bp, Artificial Sequence
  Synthetic: descartes_1824_DPF1
cttcaggtgccggagacaga

SEQ ID NO: 5912 - DNA, 20 bp, Artificial Sequence
  Synthetic: descartes_1825_DPF1
caattcacggtgaacatgac

SEQ ID NO: 5913 - DNA, 20 bp, Artificial Sequence
  Synthetic: descartes_1826_DPF1
tgatgactgcgatcggggtt

SEQ ID NO: 5914 - DNA, 20 bp, Artificial Sequence
  Synthetic: descartes_1827_DPF1
ctttgtgcctcagggaccca

SEQ ID NO: 5915 - DNA, 20 bp, Artificial Sequence
  Synthetic: descartes_1828_DPF2
ccagaggtctgaggagcaga

SEQ ID NO: 5916 - DNA, 20 bp, Artificial Sequence
  Synthetic: descartes_1829_DPF2
ctgtgaccaacagtcgagcg

SEQ ID NO: 5917 - DNA, 20 bp, Artificial Sequence
  Synthetic: descartes_1830_DPF2
aaacaaaagcatacctcgaa

SEQ ID NO: 5918 - DNA, 20 bp, Artificial Sequence
  Synthetic: descartes_1831_DPF2
catccagatgtaacaattgc

SEQ ID NO: 5919 - DNA, 20 bp, Artificial Sequence
  Synthetic: descartes_1832_DPF2
tgctcctcagacctctggga

SEQ ID NO: 5920 - DNA, 20 bp, Artificial Sequence
  Synthetic: descartes_1833_DPF2
ccctttccccgacgcttggg

SEQ ID NO: 5921 - DNA, 20 bp, Artificial Sequence
  Synthetic: descartes_1834_DPF2
gaggctctgttgcgcactga

SEQ ID NO: 5922 - DNA, 20 bp, Artificial Sequence
  Synthetic: descartes_1835_DPF2
tggaaaacgttacaagaacc

SEQ ID NO: 5923 - DNA, 20 bp, Artificial Sequence
  Synthetic: descartes_1836_DPF3
ccctgaacatgaccgaggct

SEQ ID NO: 5924 - DNA, 20 bp, Artificial Sequence
  Synthetic: descartes_1837_DPF3
taccgaacccacaactgatt

SEQ ID NO: 5925 - DNA, 20 bp, Artificial Sequence
  Synthetic: descartes_1838_DPF3
gctgcaacaccgctgatgct

SEQ ID NO: 5926 - DNA, 20 bp, Artificial Sequence
  Synthetic: descartes_1839_DPF3
ggaggagaaggcaggaagga

SEQ ID NO: 5927 - DNA, 20 bp, Artificial Sequence
  Synthetic: descartes_1840_DPF3
gaagaggatattcccaagcg

SEQ ID NO: 5928 - DNA, 20 bp, Artificial Sequence
  Synthetic: descartes_1841_DPF3
gcttgggaatatcctcttcc

SEQ ID NO: 5929 - DNA, 20 bp, Artificial Sequence
  Synthetic: descartes_1842_DPF3
ccaggtggcatcagcccggt

SEQ ID NO: 5930 - DNA, 20 bp, Artificial Sequence
  Synthetic: descartes_1843_DPF3
gaagagcctcgctcctgtcg

SEQ ID NO: 5931 - DNA, 20 bp, Artificial Sequence
  Synthetic: descartes_1844_DPP4
gtatcagatgatcttgcctc

SEQ ID NO: 5932 - DNA, 20 bp, Artificial Sequence
  Synthetic: descartes_1845_DPP4
gagaccaccacagagcagag

SEQ ID NO: 5933 - DNA, 20 bp, Artificial Sequence
  Synthetic: descartes_1846_DPP4
acgacacagaagtcccactt

SEQ ID NO: 5934 - DNA, 20 bp, Artificial Sequence
  Synthetic: descartes_1847_DPP4
cccttgatggtaatagcttc

SEQ ID NO: 5935 - DNA, 20 bp, Artificial Sequence
  Synthetic: descartes_1848_DPP4
gaatcctctcttctgtaatc

SEQ ID NO: 5936 - DNA, 20 bp, Artificial Sequence
  Synthetic: descartes_1849_DPP4
acataaatgtcattgttcca

SEQ ID NO: 5937 - DNA, 20 bp, Artificial Sequence
  Synthetic: descartes_1850_DPP4
gaaatagcaaatgtgtctgt

SEQ ID NO: 5938 - DNA, 20 bp, Artificial Sequence
  Synthetic: descartes_1851_DPP4
agctctgctcatgactgttg

SEQ ID NO: 5939 - DNA, 20 bp, Artificial Sequence
  Synthetic: descartes_1852_DPPA3
cctgaggactgctgctccta

SEQ ID NO: 5940 - DNA, 20 bp, Artificial Sequence
  Synthetic: descartes_1853_DPPA3
tctctgcacagacagcaatg

SEQ ID NO: 5941 - DNA, 20 bp, Artificial Sequence
  Synthetic: descartes_1854_DPPA3
ccctctatcggaagctttac

SEQ ID NO: 5942 - DNA, 20 bp, Artificial Sequence
  Synthetic: descartes_1855_DPPA3
atccaacctacatcccaggg

SEQ ID NO: 5943 - DNA, 20 bp, Artificial Sequence
  Synthetic: descartes_1856_DPPA3
cagcaggagaggagtaagaa

SEQ ID NO: 5944 - DNA, 20 bp, Artificial Sequence
  Synthetic: descartes_1857_DPPA3
tgcgtgtctaatggatggga

SEQ ID NO: 5945 - DNA, 20 bp, Artificial Sequence
  Synthetic: descartes_1858_DPPA3
ctccgtcgagagtctgtagg

SEQ ID NO: 5946 - DNA, 20 bp, Artificial Sequence
  Synthetic: descartes_1859_DPPA3
tggagaccctgggatgtagg

SEQ ID NO: 5947 - DNA, 20 bp, Artificial Sequence
  Synthetic: descartes_1860_DQX1
gtagtaacaccagggagctc

SEQ ID NO: 5948 - DNA, 20 bp, Artificial Sequence
  Synthetic: descartes_1861_DQX1
cccgtcctccactcagtgca

SEQ ID NO: 5949 - DNA, 20 bp, Artificial Sequence
  Synthetic: descartes_1862_DQX1
accatatccaaagacaactg

SEQ ID NO: 5950 - DNA, 20 bp, Artificial Sequence
  Synthetic: descartes_1863_DQX1
actgtgtggacgagatgctc

SEQ ID NO: 5951 - DNA, 20 bp, Artificial Sequence
  Synthetic: descartes_1864_DQX1
cctgtgctgtgaatccttgt

SEQ ID NO: 5952 - DNA, 20 bp, Artificial Sequence
  Synthetic: descartes_1865_DQX1
gactatctggcagccctgga

SEQ ID NO: 5953 - DNA, 20 bp, Artificial Sequence
  Synthetic: descartes_1866_DQX1
caatcctaggatccgagcag

SEQ ID NO: 5954 - DNA, 20 bp, Artificial Sequence
  Synthetic: descartes_1867_DQX1
ctccctgctgtagaatctgc

SEQ ID NO: 5955 - DNA, 20 bp, Artificial Sequence
  Synthetic: descartes_1868_DUSP1
agggtcactaccagtacaag

SEQ ID NO: 5956 - DNA, 20 bp, Artificial Sequence
  Synthetic: descartes_1869_DUSP1
ccggtcagccaccatctgcc

SEQ ID NO: 5957 - DNA, 20 bp, Artificial Sequence
  Synthetic: descartes_1870_DUSP1
tgaagcagaggcgaagcatc

SEQ ID NO: 5958 - DNA, 20 bp, Artificial Sequence
  Synthetic: descartes_1871_DUSP1
ggcttcctgcccggagctgt

SEQ ID NO: 5959 - DNA, 20 bp, Artificial Sequence
  Synthetic: descartes_1872_DUSP1
agtcccaggtgctggctccg

SEQ ID NO: 5960 - DNA, 20 bp, Artificial Sequence
  Synthetic: descartes_1873_DUSP1
tccactgccaggcaggcatt

SEQ ID NO: 5961 - DNA, 20 bp, Artificial Sequence
  Synthetic: descartes_1874_DUSP1
ctgcacagctccgggcagga

SEQ ID NO: 5962 - DNA, 20 bp, Artificial Sequence
  Synthetic: descartes_1875_DUSP1
tgtacctgggcagtgcgtat

SEQ ID NO: 5963 - DNA, 20 bp, Artificial Sequence
  Synthetic: descartes_1876_DUSP10
tgatgagaataccaatgaac

SEQ ID NO: 5964 - DNA, 20 bp, Artificial Sequence
  Synthetic: descartes_1877_DUSP10
ggtcttcctcgaactctagc

SEQ ID NO: 5965 - DNA, 20 bp, Artificial Sequence
  Synthetic: descartes_1878_DUSP10
atggttctgcttaaaactac

SEQ ID NO: 5966 - DNA, 20 bp, Artificial Sequence
  Synthetic: descartes_1879_DUSP10
agcagaaccatgaaaacctc

SEQ ID NO: 5967 - DNA, 20 bp, Artificial Sequence
  Synthetic: descartes_1880_DUSP10
gtgtaaggattctcggtgtc

SEQ ID NO: 5968 - DNA, 20 bp, Artificial Sequence
  Synthetic: descartes_1881_DUSP10
ctgtagggaaggcaaggact

SEQ ID NO: 5969 - DNA, 20 bp, Artificial Sequence
  Synthetic: descartes_1882_DUSP10
gactctagttaccttggctc

SEQ ID NO: 5970 - DNA, 20 bp, Artificial Sequence
  Synthetic: descartes_1883_DUSP10
taagcatcagtcatggtcat

SEQ ID NO: 5971 - DNA, 20 bp, Artificial Sequence
  Synthetic: descartes_1884_DUSP22
gctgggaggatgccctgcac

SEQ ID NO: 5972 - DNA, 20 bp, Artificial Sequence
  Synthetic: descartes_1885_DUSP22
gcttcttctgcatcctgcaa

SEQ ID NO: 5973 - DNA, 20 bp, Artificial Sequence
  Synthetic: descartes_1886_DUSP22
caggatgcagaagaagccaa

SEQ ID NO: 5974 - DNA, 20 bp, Artificial Sequence
  Synthetic: descartes_1887_DUSP22
aaagaaagtattaaattcat

SEQ ID NO: 5975 - DNA, 20 bp, Artificial Sequence
  Synthetic: descartes_1888_DUSP22
cggcactggctccgctgacc

SEQ ID NO: 5976 - DNA, 20 bp, Artificial Sequence
  Synthetic: descartes_1889_DUSP22
agatggtgaatccgctgctg

SEQ ID NO: 5977 - DNA, 20 bp, Artificial Sequence
  Synthetic: descartes_1890_DUSP22
aagttgccgatgtacaggcc

SEQ ID NO: 5978 - DNA, 20 bp, Artificial Sequence
  Synthetic: descartes_1891_DUSP22
atactttctttgaaatgtct

SEQ ID NO: 5979 - DNA, 20 bp, Artificial Sequence
  Synthetic: descartes_1892_DUSP3
agccaaagcctggtcaatga

SEQ ID NO: 5980 - DNA, 20 bp, Artificial Sequence
  Synthetic: descartes_1893_DUSP3
aacttcccctccttggctag

SEQ ID NO: 5981 - DNA, 20 bp, Artificial Sequence
  Synthetic: descartes_1894_DUSP3
aaagtaagcgctgaggttga

SEQ ID NO: 5982 - DNA, 20 bp, Artificial Sequence
  Synthetic: descartes_1895_DUSP3
aaagggctgccgacttcatt

SEQ ID NO: 5983 - DNA, 20 bp, Artificial Sequence
  Synthetic: descartes_1896_DUSP3
tgcagcttggggatgtcctg

SEQ ID NO: 5984 - DNA, 20 bp, Artificial Sequence
  Synthetic: descartes_1897_DYNLT3
ggtggtgaagattataatca

SEQ ID NO: 5985 - DNA, 20 bp, Artificial Sequence
  Synthetic: descartes_1898_DYNLT3
ccaacttaaccaggtgtgtt

SEQ ID NO: 5986 - DNA, 20 bp, Artificial Sequence
  Synthetic: descartes_1899_DYNLT3
acacagccagctcctgtttt

SEQ ID NO: 5987 - DNA, 20 bp, Artificial Sequence
  Synthetic: descartes_1900_DYNLT3
acaatattgtgggcttcctc

SEQ ID NO: 5988 - DNA, 20 bp, Artificial Sequence
  Synthetic: descartes_1901_DYNLT3
taggcttttcccaacttaac

SEQ ID NO: 5989 - DNA, 20 bp, Artificial Sequence
  Synthetic: descartes_1902_EFNB1
ggatagatcaccaagccctt

SEQ ID NO: 5990 - DNA, 20 bp, Artificial Sequence
  Synthetic: descartes_1903_EFNB1
ccatcaagttccaggagttc

SEQ ID NO: 5991 - DNA, 20 bp, Artificial Sequence
  Synthetic: descartes_1904_EFNB1
cagcccctccaggcttccat

SEQ ID NO: 5992 - DNA, 20 bp, Artificial Sequence
  Synthetic: descartes_1905_EFNB1
ctgctctggcctattgcagg

SEQ ID NO: 5993 - DNA, 20 bp, Artificial Sequence
  Synthetic: descartes_1906_EFNB3
gggggacagcccctcctcgg

SEQ ID NO: 5994 - DNA, 20 bp, Artificial Sequence
  Synthetic: descartes_1907_EFNB3
gggcagggggtgcctcacag

SEQ ID NO: 5995 - DNA, 20 bp, Artificial Sequence
  Synthetic: descartes_1908_EFNB3
gagggctctgggggggccca

SEQ ID NO: 5996 - DNA, 20 bp, Artificial Sequence
  Synthetic: descartes_1909_EFNB3
catgggcatttcagacacag

SEQ ID NO: 5997 - DNA, 20 bp, Artificial Sequence
  Synthetic: descartes_1910_EFNB3
tcccactcggagaagcacct

SEQ ID NO: 5998 - DNA, 20 bp, Artificial Sequence
  Synthetic: descartes_1911_EFNB3
gggctggtgtctgggctcag

SEQ ID NO: 5999 - DNA, 20 bp, Artificial Sequence
  Synthetic: descartes_1912_EFNB3
agacacaggttttcggggga

SEQ ID NO: 6000 - DNA, 20 bp, Artificial Sequence
  Synthetic: descartes_1913_EGR2
tgcaccagctgtctgacaac

SEQ ID NO: 6001 - DNA, 20 bp, Artificial Sequence
  Synthetic: descartes_1914_EGR2
cccggagtgatgagaggaag

SEQ ID NO: 6002 - DNA, 20 bp, Artificial Sequence
  Synthetic: descartes_1915_EGR2
taggtgcagagacgggagca

SEQ ID NO: 6003 - DNA, 20 bp, Artificial Sequence
  Synthetic: descartes_1916_EGR2
cctgcccactggacaccctg

SEQ ID NO: 6004 - DNA, 20 bp, Artificial Sequence
  Synthetic: descartes_1917_EGR2
ctcccgtctctgcacctaga

SEQ ID NO: 6005 - DNA, 20 bp, Artificial Sequence
  Synthetic: descartes_1918_EGR2
tctacggccttggcggtcat

SEQ ID NO: 6006 - DNA, 20 bp, Artificial Sequence
  Synthetic: descartes_1919_EGR2
ccctggggggccccagtgct

SEQ ID NO: 6007 - DNA, 20 bp, Artificial Sequence
  Synthetic: descartes_1920_EGR2
ggccacagtagtcacaggcg

SEQ ID NO: 6008 - DNA, 20 bp, Artificial Sequence
  Synthetic: descartes_1921_EHMT1
acaagacccattggtctcac

SEQ ID NO: 6009 - DNA, 20 bp, Artificial Sequence
  Synthetic: descartes_1922_EHMT1
tctggactccctggatctcc

SEQ ID NO: 6010 - DNA, 20 bp, Artificial Sequence
  Synthetic: descartes_1923_EHMT1
gcagctgcagtatctcggaa

SEQ ID NO: 6011 - DNA, 20 bp, Artificial Sequence
  Synthetic: descartes_1924_EHMT1
agagcataactcattccact

SEQ ID NO: 6012 - DNA, 20 bp, Artificial Sequence
  Synthetic: descartes_1925_EHMT1
ccccccttcccatcccttca

SEQ ID NO: 6013 - DNA, 20 bp, Artificial Sequence
  Synthetic: descartes_1926_EHMT1
ttaggaaccaggctataggt

SEQ ID NO: 6014 - DNA, 20 bp, Artificial Sequence
  Synthetic: descartes_1927_EHMT1
ttccgagatactgcagctgc

SEQ ID NO: 6015 - DNA, 20 bp, Artificial Sequence
  Synthetic: descartes_1928_EHMT1
tcaagaggaaaggaaagacc

SEQ ID NO: 6016 - DNA, 20 bp, Artificial Sequence
  Synthetic: descartes_1929_EHMT2
gctatgaggctactgagtat

SEQ ID NO: 6017 - DNA, 20 bp, Artificial Sequence
  Synthetic: descartes_1930_EHMT2
gagtgtaaccaggcgtgctc

SEQ ID NO: 6018 - DNA, 20 bp, Artificial Sequence
  Synthetic: descartes_1931_EHMT2
ccagtgagtggacatcatca

SEQ ID NO: 6019 - DNA, 20 bp, Artificial Sequence
  Synthetic: descartes_1932_EHMT2
atgtcccagaagcggtcgcc

SEQ ID NO: 6020 - DNA, 20 bp, Artificial Sequence
  Synthetic: descartes_1933_EHMT2
ccaccccaagtcggagcttg

SEQ ID NO: 6021 - DNA, 20 bp, Artificial Sequence
  Synthetic: descartes_1934_EHMT2
ggggacacccctcgtagtga

SEQ ID NO: 6022 - DNA, 20 bp, Artificial Sequence
  Synthetic: descartes_1935_EHMT2
acctgccaatgtggctctga

SEQ ID NO: 6023 - DNA, 20 bp, Artificial Sequence
  Synthetic: descartes_1936_EHMT2
actatggcgaccgcttctgg

SEQ ID NO: 6024 - DNA, 20 bp, Artificial Sequence
  Synthetic: descartes_1937_EIF2AK4
ggggaagcagtagtggagta

SEQ ID NO: 6025 - DNA, 20 bp, Artificial Sequence
  Synthetic: descartes_1938_EIF2AK4
gtgacaatgctctgccttat

SEQ ID NO: 6026 - DNA, 20 bp, Artificial Sequence
  Synthetic: descartes_1939_EIF2AK4
tgtacagctatagagatgac

SEQ ID NO: 6027 - DNA, 20 bp, Artificial Sequence
  Synthetic: descartes_1940_EIF2AK4
gcgacagaccatctagcctt

SEQ ID NO: 6028 - DNA, 20 bp, Artificial Sequence
  Synthetic: descartes_1941_EIF2AK4
acatggtcatcagaatccaa

SEQ ID NO: 6029 - DNA, 20 bp, Artificial Sequence
  Synthetic: descartes_1942_EIF2AK4
gattctgatgaccatgtgaa

SEQ ID NO: 6030 - DNA, 20 bp, Artificial Sequence
  Synthetic: descartes_1943_EIF2AK4
gcttccacttctctcctcgt

SEQ ID NO: 6031 - DNA, 20 bp, Artificial Sequence
  Synthetic: descartes_1944_EIF2AK4
atgatgtctgcagtactctt

SEQ ID NO: 6032 - DNA, 20 bp, Artificial Sequence
  Synthetic: descartes_1945_EIF2B1
gtgtatacgtcacagagtca

SEQ ID NO: 6033 - DNA, 20 bp, Artificial Sequence
  Synthetic: descartes_1946_EIF2B1
gtggaaagagccggacaaac

SEQ ID NO: 6034 - DNA, 20 bp, Artificial Sequence
  Synthetic: descartes_1947_EIF2B1
tcaggagaatatcactgtca

SEQ ID NO: 6035 - DNA, 20 bp, Artificial Sequence
  Synthetic: descartes_1948_EIF2B1
atctgagacttaaagtattc

SEQ ID NO: 6036 - DNA, 20 bp, Artificial Sequence
  Synthetic: descartes_1949_EIF2B1
agtctcagatgaaagaagat

SEQ ID NO: 6037 - DNA, 20 bp, Artificial Sequence
  Synthetic: descartes_1950_EIF2B1
tccggctctttccactaaac

SEQ ID NO: 6038 - DNA, 20 bp, Artificial Sequence
  Synthetic: descartes_1951_EIF2B1
gcacacacagccatctggtt

SEQ ID NO: 6039 - DNA, 20 bp, Artificial Sequence
  Synthetic: descartes_1952_EIF2B1
tatggcactggtgagattcg

SEQ ID NO: 6040 - DNA, 20 bp, Artificial Sequence
  Synthetic: descartes_1953_EIF2B2
ccgttatgtcaagagtcaac

SEQ ID NO: 6041 - DNA, 20 bp, Artificial Sequence
  Synthetic: descartes_1954_EIF2B2
actacgttcccccagagctc

SEQ ID NO: 6042 - DNA, 20 bp, Artificial Sequence
  Synthetic: descartes_1955_EIF2B2
aacataggtgcacagacgat

SEQ ID NO: 6043 - DNA, 20 bp, Artificial Sequence
  Synthetic: descartes_1956_EIF2B2
tccaaagcaggtattgagac

SEQ ID NO: 6044 - DNA, 20 bp, Artificial Sequence
  Synthetic: descartes_1957_EIF2B2
ggcctccggatgtcaacagt

SEQ ID NO: 6045 - DNA, 20 bp, Artificial Sequence
  Synthetic: descartes_1958_EIF2B2
tgcagggactcctgctgatc

SEQ ID NO: 6046 - DNA, 20 bp, Artificial Sequence
  Synthetic: descartes_1959_EIF2B2
agcttccattatgcccaact

SEQ ID NO: 6047 - DNA, 20 bp, Artificial Sequence
  Synthetic: descartes_1960_EIF2B2
ctgccagtgccagagtgtga

SEQ ID NO: 6048 - DNA, 20 bp, Artificial Sequence
  Synthetic: descartes_1961_EIF2B3
gatatatgtagcgcaaagaa

SEQ ID NO: 6049 - DNA, 20 bp, Artificial Sequence
  Synthetic: descartes_1962_EIF2B3
cccctgtacccacttgaggc

SEQ ID NO: 6050 - DNA, 20 bp, Artificial Sequence
  Synthetic: descartes_1963_EIF2B3
cattaggaaatccacgatgt

SEQ ID NO: 6051 - DNA, 20 bp, Artificial Sequence
  Synthetic: descartes_1964_EIF2B3
accgggaacaggttctatgc

SEQ ID NO: 6052 - DNA, 20 bp, Artificial Sequence
  Synthetic: descartes_1965_EIF2B3
tcatcaacatagcaagtgat

SEQ ID NO: 6053 - DNA, 20 bp, Artificial Sequence
  Synthetic: descartes_1966_EIF2B3
gtacccattgaacctgcttg

SEQ ID NO: 6054 - DNA, 20 bp, Artificial Sequence
  Synthetic: descartes_1967_EIF2B3
gtgagaaaacagttttcctc

SEQ ID NO: 6055 - DNA, 20 bp, Artificial Sequence
  Synthetic: descartes_1968_EIF2B3
tcactaaatatggaatcagt

SEQ ID NO: 6056 - DNA, 20 bp, Artificial Sequence
  Synthetic: descartes_1969_EIF2B4
acagcaaaccagcactggta

SEQ ID NO: 6057 - DNA, 20 bp, Artificial Sequence
  Synthetic: descartes_1970_EIF2B4
ctgtgaaacatacaagttct

SEQ ID NO: 6058 - DNA, 20 bp, Artificial Sequence
  Synthetic: descartes_1971_EIF2B4
tcccgaggagtgcccaactg

SEQ ID NO: 6059 - DNA, 20 bp, Artificial Sequence
  Synthetic: descartes_1972_EIF2B4
cttaccagaagatcagtaat

SEQ ID NO: 6060 - DNA, 20 bp, Artificial Sequence
  Synthetic: descartes_1973_EIF2B4
cttccgaagctgcagctttt

SEQ ID NO: 6061 - DNA, 20 bp, Artificial Sequence
  Synthetic: descartes_1974_EIF2B4
ggggcacgagtactcggcgc

SEQ ID NO: 6062 - DNA, 20 bp, Artificial Sequence
  Synthetic: descartes_1975_EIF2B4
tgatgcagactcgggatccg

SEQ ID NO: 6063 - DNA, 20 bp, Artificial Sequence
  Synthetic: descartes_1976_EIF2B4
acaagccttctcagaagtag

SEQ ID NO: 6064 - DNA, 20 bp, Artificial Sequence
  Synthetic: descartes_1977_EIF2B5
agatgacatccccatacacc

SEQ ID NO: 6065 - DNA, 20 bp, Artificial Sequence
  Synthetic: descartes_1978_EIF2B5
gctgaaccagctcagaattg

SEQ ID NO: 6066 - DNA, 20 bp, Artificial Sequence
  Synthetic: descartes_1979_EIF2B5
agtgtcactcgttccttgac

SEQ ID NO: 6067 - DNA, 20 bp, Artificial Sequence
  Synthetic: descartes_1980_EIF2B5
gtagtcaaagttgtctgtaa

SEQ ID NO: 6068 - DNA, 20 bp, Artificial Sequence
  Synthetic: descartes_1981_EIF2B5
ctgtacacctgtggcagtca

SEQ ID NO: 6069 - DNA, 20 bp, Artificial Sequence
  Synthetic: descartes_1982_EIF2B5
actaccaaactcgagatgac

SEQ ID NO: 6070 - DNA, 20 bp, Artificial Sequence
  Synthetic: descartes_1983_EIF2B5
tgtgatgacgatgatcttca

SEQ ID NO: 6071 - DNA, 20 bp, Artificial Sequence
  Synthetic: descartes_1984_EIF2B5
ggaacactacagcggggcaa

SEQ ID NO: 6072 - DNA, 20 bp, Artificial Sequence
  Synthetic: descartes_1985_ELF1
atagctacctgagaagtaaa

SEQ ID NO: 6073 - DNA, 20 bp, Artificial Sequence
  Synthetic: descartes_1986_ELF1
ctggcactgctccaggacaa

SEQ ID NO: 6074 - DNA, 20 bp, Artificial Sequence
  Synthetic: descartes_1987_ELF1
aagaaatgccaaaagatctt

SEQ ID NO: 6075 - DNA, 20 bp, Artificial Sequence
  Synthetic: descartes_1988_ELF1
cccctggacttgaagatact

SEQ ID NO: 6076 - DNA, 20 bp, Artificial Sequence
  Synthetic: descartes_1989_ELF1
tgcttcccccacaacctgga

SEQ ID NO: 6077 - DNA, 20 bp, Artificial Sequence
  Synthetic: descartes_1990_ELF1
gagtgttactgtatgcaact

SEQ ID NO: 6078 - DNA, 20 bp, Artificial Sequence
  Synthetic: descartes_1991_ELF1
ccagaatacccctttggtaa

SEQ ID NO: 6079 - DNA, 20 bp, Artificial Sequence
  Synthetic: descartes_1992_ELF1
ggacaagtagccttgtcctg

SEQ ID NO: 6080 - DNA, 20 bp, Artificial Sequence
  Synthetic: descartes_1993_ELF4
tgcttcccccacagcttgga

SEQ ID NO: 6081 - DNA, 20 bp, Artificial Sequence
  Synthetic: descartes_1994_ELF4
gcttctcccaagaagagctg

SEQ ID NO: 6082 - DNA, 20 bp, Artificial Sequence
  Synthetic: descartes_1995_ELF4
caggggttcccacaatccga

SEQ ID NO: 6083 - DNA, 20 bp, Artificial Sequence
  Synthetic: descartes_1996_ELF4
gagtccaccagtttgaagat

SEQ ID NO: 6084 - DNA, 20 bp, Artificial Sequence
  Synthetic: descartes_1997_ELF4
aggagatgcccaaggacctg

SEQ ID NO: 6085 - DNA, 20 bp, Artificial Sequence
  Synthetic: descartes_1998_ELF4
tgtcttgcagaagagccagg

SEQ ID NO: 6086 - DNA, 20 bp, Artificial Sequence
  Synthetic: descartes_1999_ELF4
cccctgaacgccagtttcca

SEQ ID NO: 6087 - DNA, 20 bp, Artificial Sequence
  Synthetic: descartes_2000_ELF4
ctgcctctgagcccgatgcc

SEQ ID NO: 6088 - DNA, 20 bp, Artificial Sequence
  Synthetic: descartes_2001_ELP3
gtaggatcccggctgctcac

SEQ ID NO: 6089 - DNA, 20 bp, Artificial Sequence
  Synthetic: descartes_2002_ELP3
ccagacccatgttcttctct

SEQ ID NO: 6090 - DNA, 20 bp, Artificial Sequence
  Synthetic: descartes_2003_ELP3
catgatgccttatcaggaca

SEQ ID NO: 6091 - DNA, 20 bp, Artificial Sequence
  Synthetic: descartes_2004_ELP3
gaataaaataatctctgtat

SEQ ID NO: 6092 - DNA, 20 bp, Artificial Sequence
  Synthetic: descartes_2005_ELP3
ctacagacaagacaccgaat

SEQ ID NO: 6093 - DNA, 20 bp, Artificial Sequence
  Synthetic: descartes_2006_ELP3
ccagccaccatttgcaacat

SEQ ID NO: 6094 - DNA, 20 bp, Artificial Sequence
  Synthetic: descartes_2007_ELP3
ctgtaaaactgatgtgtgga

SEQ ID NO: 6095 - DNA, 20 bp, Artificial Sequence
  Synthetic: descartes_2008_ELP3
agtattccacccagtcttac

SEQ ID NO: 6096 - DNA, 20 bp, Artificial Sequence
  Synthetic: descartes_2009_EMP2
tcctaacctccatcatccag

SEQ ID NO: 6097 - DNA, 20 bp, Artificial Sequence
  Synthetic: descartes_2010_EMP2
cagatgtctggagaatatgt

SEQ ID NO: 6098 - DNA, 20 bp, Artificial Sequence
  Synthetic: descartes_2011_EMP2
atcatcgccttccacatcac

SEQ ID NO: 6099 - DNA, 20 bp, Artificial Sequence
  Synthetic: descartes_2012_EMP2
tacagacaggcgtgaagaca

SEQ ID NO: 6100 - DNA, 20 bp, Artificial Sequence
  Synthetic: descartes_2013_EMP2
cgcttcctcagtatcaggta

SEQ ID NO: 6101 - DNA, 20 bp, Artificial Sequence
  Synthetic: descartes_2014_EMP2
tcgtgaatgtcttcacgcct

SEQ ID NO: 6102 - DNA, 20 bp, Artificial Sequence
  Synthetic: descartes_2015_EMP2
gcgtttttgtcgtgaatgtc

SEQ ID NO: 6103 - DNA, 20 bp, Artificial Sequence
  Synthetic: descartes_2016_ENTPD1
atatgggactatgctgaacc

SEQ ID NO: 6104 - DNA, 20 bp, Artificial Sequence
  Synthetic: descartes_2017_ENTPD1
cctgggagccacggcaggca

SEQ ID NO: 6105 - DNA, 20 bp, Artificial Sequence
  Synthetic: descartes_2018_ENTPD1
gcctctatggcaaggactac

SEQ ID NO: 6106 - DNA, 20 bp, Artificial Sequence
  Synthetic: descartes_2019_ENTPD1
cctgactgattgcatggaaa

SEQ ID NO: 6107 - DNA, 20 bp, Artificial Sequence
  Synthetic: descartes_2020_ENTPD1
gggtacaaaagtgacttgtg

SEQ ID NO: 6108 - DNA, 20 bp, Artificial Sequence
  Synthetic: descartes_2021_ENTPD1
caagaccccctgcaccaaga

SEQ ID NO: 6109 - DNA, 20 bp, Artificial Sequence
  Synthetic: descartes_2022_ENTPD1
agatgactcttccattccag

SEQ ID NO: 6110 - DNA, 20 bp, Artificial Sequence
  Synthetic: descartes_2023_ENTPD1
tggtacctacattctctccc

SEQ ID NO: 6111 - DNA, 20 bp, Artificial Sequence
  Synthetic: descartes_2024_EOMES
gtaggcagtcactgcaatga

SEQ ID NO: 6112 - DNA, 20 bp, Artificial Sequence
  Synthetic: descartes_2025_EOMES
ccttctcagaaacgcaattc

SEQ ID NO: 6113 - DNA, 20 bp, Artificial Sequence
  Synthetic: descartes_2026_EOMES
cctcaagcccgctattataa

SEQ ID NO: 6114 - DNA, 20 bp, Artificial Sequence
  Synthetic: descartes_2027_EOMES
tgttgaagctcaagaaagga

SEQ ID NO: 6115 - DNA, 20 bp, Artificial Sequence
  Synthetic: descartes_2028_EOMES
atggaagggggtgtctctat

SEQ ID NO: 6116 - DNA, 20 bp, Artificial Sequence
  Synthetic: descartes_2029_EOMES
tgagaaggtaaaagtctggg

SEQ ID NO: 6117 - DNA, 20 bp, Artificial Sequence
  Synthetic: descartes_2030_EOMES
ctatactcttcagcattaat

SEQ ID NO: 6118 - DNA, 20 bp, Artificial Sequence
  Synthetic: descartes_2031_EOMES
attactggagttgctaggag

SEQ ID NO: 6119 - DNA, 20 bp, Artificial Sequence
  Synthetic: descartes_2032_EP300
gtgttatagcaggtgataca

SEQ ID NO: 6120 - DNA, 20 bp, Artificial Sequence
  Synthetic: descartes_2033_EP300
atgatagactgcagtcctca

SEQ ID NO: 6121 - DNA, 20 bp, Artificial Sequence
  Synthetic: descartes_2034_EP300
cccacagacaagttccccac

SEQ ID NO: 6122 - DNA, 20 bp, Artificial Sequence
  Synthetic: descartes_2035_EP300
actggagcacccgttggact

SEQ ID NO: 6123 - DNA, 20 bp, Artificial Sequence
  Synthetic: descartes_2036_EP300
agggggagacacacaggaca

SEQ ID NO: 6124 - DNA, 20 bp, Artificial Sequence
  Synthetic: descartes_2037_EP300
ggacggaagaaatgaacact

SEQ ID NO: 6125 - DNA, 20 bp, Artificial Sequence
  Synthetic: descartes_2038_EP300
aaaccagaagaactacgaca

SEQ ID NO: 6126 - DNA, 20 bp, Artificial Sequence
  Synthetic: descartes_2039_EP300
gaagatcctgagtaatatct

SEQ ID NO: 6127 - DNA, 20 bp, Artificial Sequence
  Synthetic: descartes_2040_EPO
ctccggggaaagctgaagct

SEQ ID NO: 6128 - DNA, 20 bp, Artificial Sequence
  Synthetic: descartes_2041_EPO
cccggaggaaattggagtag

SEQ ID NO: 6129 - DNA, 20 bp, Artificial Sequence
  Synthetic: descartes_2042_EPO
gtgtctgggacagtgatatt

SEQ ID NO: 6130 - DNA, 20 bp, Artificial Sequence
  Synthetic: descartes_2043_EPO
cggaaagtgtcagcagtgat

SEQ ID NO: 6131 - DNA, 20 bp, Artificial Sequence
  Synthetic: descartes_2044_EPO
cgcaaactcttccgagtcta

SEQ ID NO: 6132 - DNA, 20 bp, Artificial Sequence
  Synthetic: descartes_2045_EPO
tccacatgcagctgcagggg

SEQ ID NO: 6133 - DNA, 20 bp, Artificial Sequence
  Synthetic: descartes_2046_ERAP1
ccctctgcagaacccaaaat

SEQ ID NO: 6134 - DNA, 20 bp, Artificial Sequence
  Synthetic: descartes_2047_ERAP1
aaaggaacacacacagcagt

SEQ ID NO: 6135 - DNA, 20 bp, Artificial Sequence
  Synthetic: descartes_2048_ERAP1
agcataccgtatcccctacc

SEQ ID NO: 6136 - DNA, 20 bp, Artificial Sequence
  Synthetic: descartes_2049_ERAP1
ccctaataaccatcacagtg

SEQ ID NO: 6137 - DNA, 20 bp, Artificial Sequence
  Synthetic: descartes_2050_ERAP1
agtctgtcagcaagataacc

SEQ ID NO: 6138 - DNA, 20 bp, Artificial Sequence
  Synthetic: descartes_2051_ERAP1
caaaagcacctacagaacca

SEQ ID NO: 6139 - DNA, 20 bp, Artificial Sequence
  Synthetic: descartes_2052_ERAP1
ggtaggggatacggtatgct

SEQ ID NO: 6140 - DNA, 20 bp, Artificial Sequence
  Synthetic: descartes_2053_ERAP1
catggatcaagagatcataa

SEQ ID NO: 6141 - DNA, 20 bp, Artificial Sequence
  Synthetic: descartes_2054_ERAP2
gagagtggatagtagatatc

SEQ ID NO: 6142 - DNA, 20 bp, Artificial Sequence
  Synthetic: descartes_2055_ERAP2
tctggaaccagcagtgcaat

SEQ ID NO: 6143 - DNA, 20 bp, Artificial Sequence
  Synthetic: descartes_2056_ERAP2
ccacatgatggacagaagga

SEQ ID NO: 6144 - DNA, 20 bp, Artificial Sequence
  Synthetic: descartes_2057_ERAP2
agttaccctgctcatgaaca

SEQ ID NO: 6145 - DNA, 20 bp, Artificial Sequence
  Synthetic: descartes_2058_ERAP2
atgtggactcaaatggttac

SEQ ID NO: 6146 - DNA, 20 bp, Artificial Sequence
  Synthetic: descartes_2059_ERAP2
tcctcacccagaaaatcctt

SEQ ID NO: 6147 - DNA, 20 bp, Artificial Sequence
  Synthetic: descartes_2060_ERAP2
tctggggatgcatagatgga

SEQ ID NO: 6148 - DNA, 20 bp, Artificial Sequence
  Synthetic: descartes_2061_ERAP2
gaatgtgtctgtggatcaca

SEQ ID NO: 6149 - DNA, 20 bp, Artificial Sequence
  Synthetic: descartes_2062_ERBB2
cctgcaccacctggcagccc

SEQ ID NO: 6150 - DNA, 20 bp, Artificial Sequence
  Synthetic: descartes_2063_ERBB2
accatgatcatgtagacatc

SEQ ID NO: 6151 - DNA, 20 bp, Artificial Sequence
  Synthetic: descartes_2064_ERBB2
ctgcagcagtctccgcatcg

SEQ ID NO: 6152 - DNA, 20 bp, Artificial Sequence
  Synthetic: descartes_2065_ERBB2
gccccaaaagtcatcagctc

SEQ ID NO: 6153 - DNA, 20 bp, Artificial Sequence
  Synthetic: descartes_2066_ERBB2
gggccaaaccttacgatggg

SEQ ID NO: 6154 - DNA, 20 bp, Artificial Sequence
  Synthetic: descartes_2067_ERBB2
ccggacatggtctaagaggc

SEQ ID NO: 6155 - DNA, 20 bp, Artificial Sequence
  Synthetic: descartes_2068_ERBB2
acattctccccatcagggat

SEQ ID NO: 6156 - DNA, 20 bp, Artificial Sequence
  Synthetic: descartes_2069_ERBB2
ccgtgccaccctgagtgtca

SEQ ID NO: 6157 - DNA, 20 bp, Artificial Sequence
  Synthetic: descartes_2070_ERCC1
aggtgaaaaaagaaccaaag

SEQ ID NO: 6158 - DNA, 20 bp, Artificial Sequence
  Synthetic: descartes_2071_ERCC1
tgatacccctcgacgaggat

SEQ ID NO: 6159 - DNA, 20 bp, Artificial Sequence
  Synthetic: descartes_2072_ERCC1
tgctcataggccttgtaggt

SEQ ID NO: 6160 - DNA, 20 bp, Artificial Sequence
  Synthetic: descartes_2073_ERCC1
gcgacgtaattcccgactat

SEQ ID NO: 6161 - DNA, 20 bp, Artificial Sequence
  Synthetic: descartes_2074_ERCC1
atgtcctgcacgagcccttc

SEQ ID NO: 6162 - DNA, 20 bp, Artificial Sequence
  Synthetic: descartes_2075_ERCC1
tgagggcccaggcctgggca

SEQ ID NO: 6163 - DNA, 20 bp, Artificial Sequence
  Synthetic: descartes_2076_ERCC1
gggctctctccttcccccaa

SEQ ID NO: 6164 - DNA, 20 bp, Artificial Sequence
  Synthetic: descartes_2077_ERCC1
accttaaaactttggggtct

SEQ ID NO: 6165 - DNA, 20 bp, Artificial Sequence
  Synthetic: descartes_2078_ERMAP
gtcttgtctcccacatacac

SEQ ID NO: 6166 - DNA, 20 bp, Artificial Sequence
  Synthetic: descartes_2079_ERMAP
gttgtcagcatcctaggctc

SEQ ID NO: 6167 - DNA, 20 bp, Artificial Sequence
  Synthetic: descartes_2080_ERMAP
ggatgtgctgtgtctgggtc

SEQ ID NO: 6168 - DNA, 20 bp, Artificial Sequence
  Synthetic: descartes_2081_ERMAP
tgaggaccaaagatgtgtaa

SEQ ID NO: 6169 - DNA, 20 bp, Artificial Sequence
  Synthetic: descartes_2082_ERMAP
tctggcccccttcgcccttt

SEQ ID NO: 6170 - DNA, 20 bp, Artificial Sequence
  Synthetic: descartes_2083_ERMAP
tgtagttctgaacaaatgac

SEQ ID NO: 6171 - DNA, 20 bp, Artificial Sequence
  Synthetic: descartes_2084_ERMAP
ccttatctggaagcaaagaa

SEQ ID NO: 6172 - DNA, 20 bp, Artificial Sequence
  Synthetic: descartes_2085_ERMAP
ctggactatgaagcaggagt

SEQ ID NO: 6173 - DNA, 20 bp, Artificial Sequence
  Synthetic: descartes_2086_EXO1
gaaggtaaagtacatccatc

SEQ ID NO: 6174 - DNA, 20 bp, Artificial Sequence
  Synthetic: descartes_2087_EXO1
actgcgacacatcagacata

SEQ ID NO: 6175 - DNA, 20 bp, Artificial Sequence
  Synthetic: descartes_2088_EXO1
caaggaccatttcaccaccc

SEQ ID NO: 6176 - DNA, 20 bp, Artificial Sequence
  Synthetic: descartes_2089_EXO1
cgaagaagaccaagaaaaat

SEQ ID NO: 6177 - DNA, 20 bp, Artificial Sequence
  Synthetic: descartes_2090_EXO1
agatgccccacaattgaagg

SEQ ID NO: 6178 - DNA, 20 bp, Artificial Sequence
  Synthetic: descartes_2091_EXO1
ccaggtcaggcacaaacact

SEQ ID NO: 6179 - DNA, 20 bp, Artificial Sequence
  Synthetic: descartes_2092_EXO1
acccggtctatcaatatcac

SEQ ID NO: 6180 - DNA, 20 bp, Artificial Sequence
  Synthetic: descartes_2093_EXO1
ccttaagaagattggcttgt

SEQ ID NO: 6181 - DNA, 20 bp, Artificial Sequence
  Synthetic: descartes_2094_EXOSC3
gctgtcactatgccaatcac

SEQ ID NO: 6182 - DNA, 20 bp, Artificial Sequence
  Synthetic: descartes_2095_EXOSC3
ccttaacccatattcttcca

SEQ ID NO: 6183 - DNA, 20 bp, Artificial Sequence
  Synthetic: descartes_2096_EXOSC3
gttgcaccttcaaatgacaa

SEQ ID NO: 6184 - DNA, 20 bp, Artificial Sequence
  Synthetic: descartes_2097_EXOSC3
gaagcttgtgaacacatgac

SEQ ID NO: 6185 - DNA, 20 bp, Artificial Sequence
  Synthetic: descartes_2098_EXOSC3
aagtgactctgggcttaatt

SEQ ID NO: 6186 - DNA, 20 bp, Artificial Sequence
  Synthetic: descartes_2099_EXOSC3
ctgggtggactctcagcaga

SEQ ID NO: 6187 - DNA, 20 bp, Artificial Sequence
  Synthetic: descartes_2100_EXOSC3
aaggtgcaactaaaagaaac

SEQ ID NO: 6188 - DNA, 20 bp, Artificial Sequence
  Synthetic: descartes_2101_EXOSC3
ccacttcctgtatgatttca

SEQ ID NO: 6189 - DNA, 20 bp, Artificial Sequence
  Synthetic: descartes_2102_EZH1
atgccacccctaatgtatat

SEQ ID NO: 6190 - DNA, 20 bp, Artificial Sequence
  Synthetic: descartes_2103_EZH1
ctgtaaaaactgcagcatcc

SEQ ID NO: 6191 - DNA, 20 bp, Artificial Sequence
  Synthetic: descartes_2104_EZH1
caggaaaccaccttgcagtc

SEQ ID NO: 6192 - DNA, 20 bp, Artificial Sequence
  Synthetic: descartes_2105_EZH1
gagtcttccatggcacctac

SEQ ID NO: 6193 - DNA, 20 bp, Artificial Sequence
  Synthetic: descartes_2106_EZH1
cctgaagccgtttaagttgt

SEQ ID NO: 6194 - DNA, 20 bp, Artificial Sequence
  Synthetic: descartes_2107_EZH1
cagtcaaagaatcacttatc

SEQ ID NO: 6195 - DNA, 20 bp, Artificial Sequence
  Synthetic: descartes_2108_EZH1
cctggctgtcgctgtaagac

SEQ ID NO: 6196 - DNA, 20 bp, Artificial Sequence
  Synthetic: descartes_2109_EZH1
agttgtcgaagtcgcatgta

SEQ ID NO: 6197 - DNA, 20 bp, Artificial Sequence
  Synthetic: descartes_2110_EZH2
cttggaggagtatccacatc

SEQ ID NO: 6198 - DNA, 20 bp, Artificial Sequence
  Synthetic: descartes_2111_EZH2
gagtcaaagaatctagcatc

SEQ ID NO: 6199 - DNA, 20 bp, Artificial Sequence
  Synthetic: descartes_2112_EZH2
atgcaacacccaacacttat

SEQ ID NO: 6200 - DNA, 20 bp, Artificial Sequence
  Synthetic: descartes_2113_EZH2
aatatgactgcttcctacat

SEQ ID NO: 6201 - DNA, 20 bp, Artificial Sequence
  Synthetic: descartes_2114_EZH2
agtccctgcttccctatcac

SEQ ID NO: 6202 - DNA, 20 bp, Artificial Sequence
  Synthetic: descartes_2115_EZH2
gagtcctcattggcacttac

SEQ ID NO: 6203 - DNA, 20 bp, Artificial Sequence
  Synthetic: descartes_2116_EZH2
ccaagagagccatccagact

SEQ ID NO: 6204 - DNA, 20 bp, Artificial Sequence
  Synthetic: descartes_2117_EZH2
gtcccaattaacctagcaat

SEQ ID NO: 6205 - DNA, 20 bp, Artificial Sequence
  Synthetic: descartes_2118_EZR
actccaaggaaagccaatct

SEQ ID NO: 6206 - DNA, 20 bp, Artificial Sequence
  Synthetic: descartes_2119_EZR
gcctccactatgtggataat

SEQ ID NO: 6207 - DNA, 20 bp, Artificial Sequence
  Synthetic: descartes_2120_EZR
tctcgaaatagttgattcca

SEQ ID NO: 6208 - DNA, 20 bp, Artificial Sequence
  Synthetic: descartes_2121_EZR
gctggattgcaaactccagc

SEQ ID NO: 6209 - DNA, 20 bp, Artificial Sequence
  Synthetic: descartes_2122_EZR
gggactacaacaaagaagtg

SEQ ID NO: 6210 - DNA, 20 bp, Artificial Sequence
  Synthetic: descartes_2123_EZR
gagataaaaaacaagaaagg

SEQ ID NO: 6211 - DNA, 20 bp, Artificial Sequence
  Synthetic: descartes_2124_EZR
ctacctggctgaagctggat

SEQ ID NO: 6212 - DNA, 20 bp, Artificial Sequence
  Synthetic: descartes_2125_EZR
cttggagtgaaatcaggaac

SEQ ID NO: 6213 - DNA, 20 bp, Artificial Sequence
  Synthetic: descartes_2126_FABP3
cctccatccagtgtcacaat

SEQ ID NO: 6214 - DNA, 20 bp, Artificial Sequence
  Synthetic: descartes_2127_FABP3
gggtgagaatgtccccattc

SEQ ID NO: 6215 - DNA, 20 bp, Artificial Sequence
  Synthetic: descartes_2128_FABP3
ctgggcacctggaagctagt

SEQ ID NO: 6216 - DNA, 20 bp, Artificial Sequence
  Synthetic: descartes_2129_FABP3
ctaccaggcaggtggccagc

SEQ ID NO: 6217 - DNA, 20 bp, Artificial Sequence
  Synthetic: descartes_2130_FABP3
tcataagtgcgagtgcaaac

SEQ ID NO: 6218 - DNA, 20 bp, Artificial Sequence
  Synthetic: descartes_2131_FABP3
catcaattagctcccgcaca

SEQ ID NO: 6219 - DNA, 20 bp, Artificial Sequence
  Synthetic: descartes_2132_FABP3
tgcaggtgaacaagtttccc

SEQ ID NO: 6220 - DNA, 20 bp, Artificial Sequence
  Synthetic: descartes_2133_FABP3
gatgattgtggtaggcttgg

SEQ ID NO: 6221 - DNA, 20 bp, Artificial Sequence
  Synthetic: descartes_2134_FAM35A
accgaagaagaaaagtatca

SEQ ID NO: 6222 - DNA, 20 bp, Artificial Sequence
  Synthetic: descartes_2135_FAM35A
agtactacaaaccaaatcca

SEQ ID NO: 6223 - DNA, 20 bp, Artificial Sequence
  Synthetic: descartes_2136_FAM35A
ggacaaacaggactaaaaag

SEQ ID NO: 6224 - DNA, 20 bp, Artificial Sequence
  Synthetic: descartes_2137_FAM35A
tgtggaggactgcagcattt

SEQ ID NO: 6225 - DNA, 20 bp, Artificial Sequence
  Synthetic: descartes_2138_FAM35A
gttgggaacacagtattcct

SEQ ID NO: 6226 - DNA, 20 bp, Artificial Sequence
  Synthetic: descartes_2139_FAM35A
acatgaacatgtctattcat

SEQ ID NO: 6227 - DNA, 20 bp, Artificial Sequence
  Synthetic: descartes_2140_FAM35A
atctaacacaaaaaggctct

SEQ ID NO: 6228 - DNA, 20 bp, Artificial Sequence
  Synthetic: descartes_2141_FAM35A
agtggagcaattggagcacc

SEQ ID NO: 6229 - DNA, 20 bp, Artificial Sequence
  Synthetic: descartes_2142_FAM49B
ccaatagaaaataccacaga

SEQ ID NO: 6230 - DNA, 20 bp, Artificial Sequence
  Synthetic: descartes_2143_FAM49B
gcaagagcctgctctcgctc

SEQ ID NO: 6231 - DNA, 20 bp, Artificial Sequence
  Synthetic: descartes_2144_FAM49B
atactacattcacctgatta

SEQ ID NO: 6232 - DNA, 20 bp, Artificial Sequence
  Synthetic: descartes_2145_FAM49B
gaagaccttccacactatta

SEQ ID NO: 6233 - DNA, 20 bp, Artificial Sequence
  Synthetic: descartes_2146_FAM49B
cctactagtggaacaactgc

SEQ ID NO: 6234 - DNA, 20 bp, Artificial Sequence
  Synthetic: descartes_2147_FAM49B
cttggaggtagtctcatcat

SEQ ID NO: 6235 - DNA, 20 bp, Artificial Sequence
  Synthetic: descartes_2148_FAM49B
aatgatgagactacctccaa

SEQ ID NO: 6236 - DNA, 20 bp, Artificial Sequence
  Synthetic: descartes_2149_FAM49B
tgctgaggcaactccaatgc

SEQ ID NO: 6237 - DNA, 20 bp, Artificial Sequence
  Synthetic: descartes_2150_FASLG
atggttctggttgccttggt

SEQ ID NO: 6238 - DNA, 20 bp, Artificial Sequence
  Synthetic: descartes_2151_FASLG
attgatcacaaggccaccct

SEQ ID NO: 6239 - DNA, 20 bp, Artificial Sequence
  Synthetic: descartes_2152_FASLG
tatgtcaacgtatctgagct

SEQ ID NO: 6240 - DNA, 20 bp, Artificial Sequence
  Synthetic: descartes_2153_FASLG
gaatatacaaagtacagccc

SEQ ID NO: 6241 - DNA, 20 bp, Artificial Sequence
  Synthetic: descartes_2154_FASLG
agctcttccacctacagaag

SEQ ID NO: 6242 - DNA, 20 bp, Artificial Sequence
  Synthetic: descartes_2155_FASLG
tggagtgaagtataagaagg

SEQ ID NO: 6243 - DNA, 20 bp, Artificial Sequence
  Synthetic: descartes_2156_FASLG
tatattccaaagtatacttc

SEQ ID NO: 6244 - DNA, 20 bp, Artificial Sequence
  Synthetic: descartes_2157_FASLG
accaggccttctgggcacag

SEQ ID NO: 6245 - DNA, 20 bp, Artificial Sequence
  Synthetic: descartes_2158_FCAMR
gctgcatcaagagctatcct

SEQ ID NO: 6246 - DNA, 20 bp, Artificial Sequence
  Synthetic: descartes_2159_FCAMR
acttccaatgccgcagaggt

SEQ ID NO: 6247 - DNA, 20 bp, Artificial Sequence
  Synthetic: descartes_2160_FCAMR
ggagggcaccagaagctcgg

SEQ ID NO: 6248 - DNA, 20 bp, Artificial Sequence
  Synthetic: descartes_2161_FCAMR
gcctgggaaatcctcccaca

SEQ ID NO: 6249 - DNA, 20 bp, Artificial Sequence
  Synthetic: descartes_2162_FCAMR
catcccgccctcctgctggt

SEQ ID NO: 6250 - DNA, 20 bp, Artificial Sequence
  Synthetic: descartes_2163_FCAMR
acagaaccctctgcccagct

SEQ ID NO: 6251 - DNA, 20 bp, Artificial Sequence
  Synthetic: descartes_2164_FCAMR
tggaagtgaacccccaagca

SEQ ID NO: 6252 - DNA, 20 bp, Artificial Sequence
  Synthetic: descartes_2165_FCAMR
taagcaacaatctcagggtt

SEQ ID NO: 6253 - DNA, 20 bp, Artificial Sequence
  Synthetic: descartes_2166_FCER2
acaggaactggaggaacttc

SEQ ID NO: 6254 - DNA, 20 bp, Artificial Sequence
  Synthetic: descartes_2167_FCER2
agggcacgtgttgcacacaa

SEQ ID NO: 6255 - DNA, 20 bp, Artificial Sequence
  Synthetic: descartes_2168_FCER2
tgtgcaacacgtgccctgaa

SEQ ID NO: 6256 - DNA, 20 bp, Artificial Sequence
  Synthetic: descartes_2169_FCER2
caagaacttggaaagccacc

SEQ ID NO: 6257 - DNA, 20 bp, Artificial Sequence
  Synthetic: descartes_2170_FCER2
caacggaagtgctactactt

SEQ ID NO: 6258 - DNA, 20 bp, Artificial Sequence
  Synthetic: descartes_2171_FCER2
ctggaaagactccgggagga

SEQ ID NO: 6259 - DNA, 20 bp, Artificial Sequence
  Synthetic: descartes_2172_FCER2
tctgggtggatgggagccac

SEQ ID NO: 6260 - DNA, 20 bp, Artificial Sequence
  Synthetic: descartes_2173_FCER2
aatctctgctgttcagctcg

SEQ ID NO: 6261 - DNA, 20 bp, Artificial Sequence
  Synthetic: descartes_2174_FCGR1B
gatagtaaagcacattgtac

SEQ ID NO: 6262 - DNA, 20 bp, Artificial Sequence
  Synthetic: descartes_2175_FCGR1B
gaagaagagctgaaatgtca

SEQ ID NO: 6263 - DNA, 20 bp, Artificial Sequence
  Synthetic: descartes_2176_FCGR1B
ctcttggaacacgctgaccc

SEQ ID NO: 6264 - DNA, 20 bp, Artificial Sequence
  Synthetic: descartes_2177_FCGR1B
gtgaacactgttctctgggt

SEQ ID NO: 6265 - DNA, 20 bp, Artificial Sequence
  Synthetic: descartes_2178_FCGR1B
cactggaattctaacctcac

SEQ ID NO: 6266 - DNA, 20 bp, Artificial Sequence
  Synthetic: descartes_2179_FCGR1B
acagctcagggtgaccagat

SEQ ID NO: 6267 - DNA, 20 bp, Artificial Sequence
  Synthetic: descartes_2180_FCGR1B
tatctggcagtgggaataat

SEQ ID NO: 6268 - DNA, 20 bp, Artificial Sequence
  Synthetic: descartes_2181_FCGR1B
tcaatggcacagccactcag

SEQ ID NO: 6269 - DNA, 20 bp, Artificial Sequence
  Synthetic: descartes_2182_FCGR2B
cctgcactcagggtatcctg

SEQ ID NO: 6270 - DNA, 20 bp, Artificial Sequence
  Synthetic: descartes_2183_FCGR2B
tcagggagggtctctcccat

SEQ ID NO: 6271 - DNA, 20 bp, Artificial Sequence
  Synthetic: descartes_2184_FCGR2B
ctgtgcagtggtaatcacca

SEQ ID NO: 6272 - DNA, 20 bp, Artificial Sequence
  Synthetic: descartes_2185_FCGR2B
ctgcagtagatcaaggccac

SEQ ID NO: 6273 - DNA, 20 bp, Artificial Sequence
  Synthetic: descartes_2186_FCGR2B
cattctggaagaatgtgacc

SEQ ID NO: 6274 - DNA, 20 bp, Artificial Sequence
  Synthetic: descartes_2187_FCGR2B
ccgttcggatcccaacttct

SEQ ID NO: 6275 - DNA, 20 bp, Artificial Sequence
  Synthetic: descartes_2188_FCGR2B
tccctcctggaactccaggt

SEQ ID NO: 6276 - DNA, 20 bp, Artificial Sequence
  Synthetic: descartes_2189_FCGR2B
cttgtgggatggagaagttg

SEQ ID NO: 6277 - DNA, 20 bp, Artificial Sequence
  Synthetic: descartes_2190_FCRL4
gtatactctgagatccagac

SEQ ID NO: 6278 - DNA, 20 bp, Artificial Sequence
  Synthetic: descartes_2191_FCRL4
tccccagtagtgccgatgat

SEQ ID NO: 6279 - DNA, 20 bp, Artificial Sequence
  Synthetic: descartes_2192_FCRL4
agttctatgcaacagagaaa

SEQ ID NO: 6280 - DNA, 20 bp, Artificial Sequence
  Synthetic: descartes_2193_FCRL4
ctccccagactctcctgcat

SEQ ID NO: 6281 - DNA, 20 bp, Artificial Sequence
  Synthetic: descartes_2194_FCRL4
cctcagagtagacaactgag

SEQ ID NO: 6282 - DNA, 20 bp, Artificial Sequence
  Synthetic: descartes_2195_FCRL4
cgtccatcctccatggacca

SEQ ID NO: 6283 - DNA, 20 bp, Artificial Sequence
  Synthetic: descartes_2196_FCRL4
tctgttgcatagaactgaaa

SEQ ID NO: 6284 - DNA, 20 bp, Artificial Sequence
  Synthetic: descartes_2197_FCRL4
agcaccacaccaataggatc

SEQ ID NO: 6285 - DNA, 20 bp, Artificial Sequence
  Synthetic: descartes_2198_FGA
atatcaaccaactgagctct

SEQ ID NO: 6286 - DNA, 20 bp, Artificial Sequence
  Synthetic: descartes_2199_FGA
accggacctggcaagactac

SEQ ID NO: 6287 - DNA, 20 bp, Artificial Sequence
  Synthetic: descartes_2200_FGA
ctagtagcacgagttacaac

SEQ ID NO: 6288 - DNA, 20 bp, Artificial Sequence
  Synthetic: descartes_2201_FGA
gcatggcctctcttggtgct

SEQ ID NO: 6289 - DNA, 20 bp, Artificial Sequence
  Synthetic: descartes_2202_FGA
atgcgaacagccctgaggga

SEQ ID NO: 6290 - DNA, 20 bp, Artificial Sequence
  Synthetic: descartes_2203_FGA
tgtgtggtactctctccttg

SEQ ID NO: 6291 - DNA, 20 bp, Artificial Sequence
  Synthetic: descartes_2204_FGA
ccacgggaagggaattcagc

SEQ ID NO: 6292 - DNA, 20 bp, Artificial Sequence
  Synthetic: descartes_2205_FGA
gtttccagtacttccagttc

SEQ ID NO: 6293 - DNA, 20 bp, Artificial Sequence
  Synthetic: descartes_2206_FGB
gctggacgagcccgatagcc

SEQ ID NO: 6294 - DNA, 20 bp, Artificial Sequence
  Synthetic: descartes_2207_FGB
ccagacctcctcttcttcct

SEQ ID NO: 6295 - DNA, 20 bp, Artificial Sequence
  Synthetic: descartes_2208_FGB
gattggctgcatgacatcta

SEQ ID NO: 6296 - DNA, 20 bp, Artificial Sequence
  Synthetic: descartes_2209_FGB
tagttaagtcccaaggtgtc

SEQ ID NO: 6297 - DNA, 20 bp, Artificial Sequence
  Synthetic: descartes_2210_FGB
agctgagacatcagattcta

SEQ ID NO: 6298 - DNA, 20 bp, Artificial Sequence
  Synthetic: descartes_2211_FGB
ctgccaaagtcaacactacc

SEQ ID NO: 6299 - DNA, 20 bp, Artificial Sequence
  Synthetic: descartes_2212_FGB
tatggatcccatttcctgcc

SEQ ID NO: 6300 - DNA, 20 bp, Artificial Sequence
  Synthetic: descartes_2213_FGB
tgtattcatgtcacagtata

SEQ ID NO: 6301 - DNA, 20 bp, Artificial Sequence
  Synthetic: descartes_2214_FKBP14
gaatctccaggagatcaata

SEQ ID NO: 6302 - DNA, 20 bp, Artificial Sequence
  Synthetic: descartes_2215_FKBP14
catataaacacgatgagtta

SEQ ID NO: 6303 - DNA, 20 bp, Artificial Sequence
  Synthetic: descartes_2216_FKBP14
catagcccagagcaggagga

SEQ ID NO: 6304 - DNA, 20 bp, Artificial Sequence
  Synthetic: descartes_2217_FKBP14
cagtcatcattaagatccat

SEQ ID NO: 6305 - DNA, 20 bp, Artificial Sequence
  Synthetic: descartes_2218_FKBP14
acttctggttcagggatcaa

SEQ ID NO: 6306 - DNA, 20 bp, Artificial Sequence
  Synthetic: descartes_2219_FKBP14
ccctgggcatcctggaggct

SEQ ID NO: 6307 - DNA, 20 bp, Artificial Sequence
  Synthetic: descartes_2220_FKBP14
tatgtaaattctctggcaga

SEQ ID NO: 6308 - DNA, 20 bp, Artificial Sequence
  Synthetic: descartes_2221_FKBP14
tcttctctcctacacacatt

SEQ ID NO: 6309 - DNA, 20 bp, Artificial Sequence
  Synthetic: descartes_2222_FKBP1B
attcatccagagacagaaac

SEQ ID NO: 6310 - DNA, 20 bp, Artificial Sequence
  Synthetic: descartes_2223_FKBP1B
tcctctccccatctgccccc

SEQ ID NO: 6311 - DNA, 20 bp, Artificial Sequence
  Synthetic: descartes_2224_FKBP1B
tgtctctggatgaatcaaac

SEQ ID NO: 6312 - DNA, 20 bp, Artificial Sequence
  Synthetic: descartes_2225_FKBP1B
gcccttcttggggaatgtcc

SEQ ID NO: 6313 - DNA, 20 bp, Artificial Sequence
  Synthetic: descartes_2226_FKBP1B
acgtggagctgctcaactta

SEQ ID NO: 6314 - DNA, 20 bp, Artificial Sequence
  Synthetic: descartes_2227_FKBP1B
aagttcagaattggcaaaca

SEQ ID NO: 6315 - DNA, 20 bp, Artificial Sequence
  Synthetic: descartes_2228_FKBP1B
tttctgtctctggatgaatc

SEQ ID NO: 6316 - DNA, 20 bp, Artificial Sequence
  Synthetic: descartes_2229_FKBP1B
ccaattctgaacttgaaagg

SEQ ID NO: 6317 - DNA, 20 bp, Artificial Sequence
  Synthetic: descartes_2230_FKBP7
tcccaaggaatacaatgtat

SEQ ID NO: 6318 - DNA, 20 bp, Artificial Sequence
  Synthetic: descartes_2231_FKBP7
tccagggcacatatctgtca

SEQ ID NO: 6319 - DNA, 20 bp, Artificial Sequence
  Synthetic: descartes_2232_FKBP7
gagagctgcctgtcattgtc

SEQ ID NO: 6320 - DNA, 20 bp, Artificial Sequence
  Synthetic: descartes_2233_FKBP7
gtaggtctcccttcttgctt

SEQ ID NO: 6321 - DNA, 20 bp, Artificial Sequence
  Synthetic: descartes_2234_FKBP7
ctgctcagagacaaaagaaa

SEQ ID NO: 6322 - DNA, 20 bp, Artificial Sequence
  Synthetic: descartes_2235_FKBP7
agaagaatgaccatgatggt

SEQ ID NO: 6323 - DNA, 20 bp, Artificial Sequence
  Synthetic: descartes_2236_FKBP7
tgacttgcccaacaccaaga

SEQ ID NO: 6324 - DNA, 20 bp, Artificial Sequence
  Synthetic: descartes_2237_FKBP7
catcgtccagaaaactgctc

SEQ ID NO: 6325 - DNA, 20 bp, Artificial Sequence
  Synthetic: descartes_2238_FMR1
gtgtggacactcctttcatt

SEQ ID NO: 6326 - DNA, 20 bp, Artificial Sequence
  Synthetic: descartes_2239_FMR1
gctaaccaccaacagcaagg

SEQ ID NO: 6327 - DNA, 20 bp, Artificial Sequence
  Synthetic: descartes_2240_FMR1
gtggtggtctagaactagct

SEQ ID NO: 6328 - DNA, 20 bp, Artificial Sequence
  Synthetic: descartes_2241_FMR1
gatataaaggaaaacagcac

SEQ ID NO: 6329 - DNA, 20 bp, Artificial Sequence
  Synthetic: descartes_2242_FMR1
agcctcaatcctcaccctca

SEQ ID NO: 6330 - DNA, 20 bp, Artificial Sequence
  Synthetic: descartes_2243_FMR1
atgatgtcagattcccacct

SEQ ID NO: 6331 - DNA, 20 bp, Artificial Sequence
  Synthetic: descartes_2244_FMR1
tgtgatagaatatgcagcat

SEQ ID NO: 6332 - DNA, 20 bp, Artificial Sequence
  Synthetic: descartes_2245_FMR1
cccgtgcgcagccgactacc

SEQ ID NO: 6333 - DNA, 20 bp, Artificial Sequence
  Synthetic: descartes_2246_FOXJ1
actgggaggccatcttcgac

SEQ ID NO: 6334 - DNA, 20 bp, Artificial Sequence
  Synthetic: descartes_2247_FOXJ1
cgcttatgccccagcctgcc

SEQ ID NO: 6335 - DNA, 20 bp, Artificial Sequence
  Synthetic: descartes_2248_FOXJ1
aggggttccagctcaccctg

SEQ ID NO: 6336 - DNA, 20 bp, Artificial Sequence
  Synthetic: descartes_2249_FOXJ1
atgaagcacttgttcagaga

SEQ ID NO: 6337 - DNA, 20 bp, Artificial Sequence
  Synthetic: descartes_2250_FOXJ1
aagaagcggcgactgccccc

SEQ ID NO: 6338 - DNA, 20 bp, Artificial Sequence
  Synthetic: descartes_2251_FOXJ1
aggctggggatgccaccctg

SEQ ID NO: 6339 - DNA, 20 bp, Artificial Sequence
  Synthetic: descartes_2252_FOXJ1
cccgccaggccgcgcaggag

SEQ ID NO: 6340 - DNA, 20 bp, Artificial Sequence
  Synthetic: descartes_2253_FOXP3
ggaaggtgcagagcagtgcc

SEQ ID NO: 6341 - DNA, 20 bp, Artificial Sequence
  Synthetic: descartes_2254_FOXP3
ggctgtgccccagagctcct

SEQ ID NO: 6342 - DNA, 20 bp, Artificial Sequence
  Synthetic: descartes_2255_FOXP3
ggtgcagccctccagctggg

SEQ ID NO: 6343 - DNA, 20 bp, Artificial Sequence
  Synthetic: descartes_2256_FOXP3
ccagccaggtgggcctgcat

SEQ ID NO: 6344 - DNA, 20 bp, Artificial Sequence
  Synthetic: descartes_2257_FOXP3
ttgcggaactccagctcatc

SEQ ID NO: 6345 - DNA, 20 bp, Artificial Sequence
  Synthetic: descartes_2258_FOXP3
catggctaccccacaggtgc

SEQ ID NO: 6346 - DNA, 20 bp, Artificial Sequence
  Synthetic: descartes_2259_FOXP3
ccttcttcagaaaccatcct

SEQ ID NO: 6347 - DNA, 20 bp, Artificial Sequence
  Synthetic: descartes_2260_FOXP3
ccagcagtgggtaggagctc

SEQ ID NO: 6348 - DNA, 20 bp, Artificial Sequence
  Synthetic: descartes_2261_FSD1
acatgaaatacatgaacttc

SEQ ID NO: 6349 - DNA, 20 bp, Artificial Sequence
  Synthetic: descartes_2262_FSD1
agggagtagataaagctctg

SEQ ID NO: 6350 - DNA, 20 bp, Artificial Sequence
  Synthetic: descartes_2263_FSD1
gtgcgggcattgtagaagga

SEQ ID NO: 6351 - DNA, 20 bp, Artificial Sequence
  Synthetic: descartes_2264_FSD1
tcttcataagcatgccttct

SEQ ID NO: 6352 - DNA, 20 bp, Artificial Sequence
  Synthetic: descartes_2265_FSD1
tctactccctgaaacagatg

SEQ ID NO: 6353 - DNA, 20 bp, Artificial Sequence
  Synthetic: descartes_2266_FSD1
agctcctccaggagggagaa

SEQ ID NO: 6354 - DNA, 20 bp, Artificial Sequence
  Synthetic: descartes_2267_FSD1
caggcagcgcacagcactgg

SEQ ID NO: 6355 - DNA, 20 bp, Artificial Sequence
  Synthetic: descartes_2268_FSD1
aagaccaggttcacacagcc

SEQ ID NO: 6356 - DNA, 20 bp, Artificial Sequence
  Synthetic: descartes_2269_FXR2
ttggcacccgagagaacatc

SEQ ID NO: 6357 - DNA, 20 bp, Artificial Sequence
  Synthetic: descartes_2270_FXR2
gtgcgcaggcttcggaaatg

SEQ ID NO: 6358 - DNA, 20 bp, Artificial Sequence
  Synthetic: descartes_2271_FXR2
aaagaagatggtgacagagt

SEQ ID NO: 6359 - DNA, 20 bp, Artificial Sequence
  Synthetic: descartes_2272_FXR2
tccacaatctcctggatcac

SEQ ID NO: 6360 - DNA, 20 bp, Artificial Sequence
  Synthetic: descartes_2273_FXR2
tgaggactcagtgcaagtgc

SEQ ID NO: 6361 - DNA, 20 bp, Artificial Sequence
  Synthetic: descartes_2274_FXR2
attgtaggtggcatcacagg

SEQ ID NO: 6362 - DNA, 20 bp, Artificial Sequence
  Synthetic: descartes_2275_FXR2
gggatgtccggctaccacct

SEQ ID NO: 6363 - DNA, 20 bp, Artificial Sequence
  Synthetic: descartes_2276_FXR2
ctggagtatcacctctccta

SEQ ID NO: 6364 - DNA, 20 bp, Artificial Sequence
  Synthetic: descartes_2277_FYB1
cctgtagatctctggttccc

SEQ ID NO: 6365 - DNA, 20 bp, Artificial Sequence
  Synthetic: descartes_2278_FYB1
gtggaggtggacccaaggta

SEQ ID NO: 6366 - DNA, 20 bp, Artificial Sequence
  Synthetic: descartes_2279_FYB1
ccttgggtccacctccacca

SEQ ID NO: 6367 - DNA, 20 bp, Artificial Sequence
  Synthetic: descartes_2280_FYB1
aaagaatcatagtcaatctc

SEQ ID NO: 6368 - DNA, 20 bp, Artificial Sequence
  Synthetic: descartes_2281_FYB1
gttgaatataggactctaat

SEQ ID NO: 6369 - DNA, 20 bp, Artificial Sequence
  Synthetic: descartes_2282_FYB1
cctttaaccccagtcaattt

SEQ ID NO: 6370 - DNA, 20 bp, Artificial Sequence
  Synthetic: descartes_2283_FYB1
cgatgatgtggatacctctg

SEQ ID NO: 6371 - DNA, 20 bp, Artificial Sequence
  Synthetic: descartes_2284_FYB1
gagagacctgggcctcccct

SEQ ID NO: 6372 - DNA, 20 bp, Artificial Sequence
  Synthetic: descartes_2285_FYB2
gatggaaaagaagcactcaa

SEQ ID NO: 6373 - DNA, 20 bp, Artificial Sequence
  Synthetic: descartes_2286_FYB2
gagtcaactaaagaaactcc

SEQ ID NO: 6374 - DNA, 20 bp, Artificial Sequence
  Synthetic: descartes_2287_FYB2
actcaggtctacatcatcat

SEQ ID NO: 6375 - DNA, 20 bp, Artificial Sequence
  Synthetic: descartes_2288_FYB2
gccaatgggaaacccctctc

SEQ ID NO: 6376 - DNA, 20 bp, Artificial Sequence
  Synthetic: descartes_2289_FYB2
tgatatgttgagaaattaca

SEQ ID NO: 6377 - DNA, 20 bp, Artificial Sequence
  Synthetic: descartes_2290_FYB2
aggtgtcccttcacaggcat

SEQ ID NO: 6378 - DNA, 20 bp, Artificial Sequence
  Synthetic: descartes_2291_FYB2
atctcagaaaagtgaaatgt

SEQ ID NO: 6379 - DNA, 20 bp, Artificial Sequence
  Synthetic: descartes_2292_FYB2
atatctgagacactctggca

SEQ ID NO: 6380 - DNA, 20 bp, Artificial Sequence
  Synthetic: descartes_2293_FYN
atatcatcccaatcacggat

SEQ ID NO: 6381 - DNA, 20 bp, Artificial Sequence
  Synthetic: descartes_2294_FYN
actctcgcggataagaaagg

SEQ ID NO: 6382 - DNA, 20 bp, Artificial Sequence
  Synthetic: descartes_2295_FYN
agagctcttccttctccatc

SEQ ID NO: 6383 - DNA, 20 bp, Artificial Sequence
  Synthetic: descartes_2296_FYN
acttaactgtgattgcatcg

SEQ ID NO: 6384 - DNA, 20 bp, Artificial Sequence
  Synthetic: descartes_2297_FYN
ccagtctcttgatcaactgc

SEQ ID NO: 6385 - DNA, 20 bp, Artificial Sequence
  Synthetic: descartes_2298_FYN
ctgatcgcagatctctatgg

SEQ ID NO: 6386 - DNA, 20 bp, Artificial Sequence
  Synthetic: descartes_2299_FYN
acaaaggagaaaaatttcaa

SEQ ID NO: 6387 - DNA, 20 bp, Artificial Sequence
  Synthetic: descartes_2300_FYN
acatggtctcctttcatatc

SEQ ID NO: 6388 - DNA, 20 bp, Artificial Sequence
  Synthetic: descartes_2301_G2E3
ggtgtacaatatgcaataat

SEQ ID NO: 6389 - DNA, 20 bp, Artificial Sequence
  Synthetic: descartes_2302_G2E3
ggtgatgactcttccaacaa

SEQ ID NO: 6390 - DNA, 20 bp, Artificial Sequence
  Synthetic: descartes_2303_G2E3
gaagaaatgtatcaacacta

SEQ ID NO: 6391 - DNA, 20 bp, Artificial Sequence
  Synthetic: descartes_2304_G2E3
ctgttggaaacaagtgtaat

SEQ ID NO: 6392 - DNA, 20 bp, Artificial Sequence
  Synthetic: descartes_2305_G2E3
cagtacacacattacctgat

SEQ ID NO: 6393 - DNA, 20 bp, Artificial Sequence
  Synthetic: descartes_2306_G2E3
ccatgtggacttcagagaga

SEQ ID NO: 6394 - DNA, 20 bp, Artificial Sequence
  Synthetic: descartes_2307_G2E3
gcaattcccatcaccaatac

SEQ ID NO: 6395 - DNA, 20 bp, Artificial Sequence
  Synthetic: descartes_2308_G2E3
gaagtgagcatcctggatca

SEQ ID NO: 6396 - DNA, 20 bp, Artificial Sequence
  Synthetic: descartes_2309_GABBR1
tatgagactgaagcccggaa

SEQ ID NO: 6397 - DNA, 20 bp, Artificial Sequence
  Synthetic: descartes_2310_GABBR1
acgggcacagctggatctga

SEQ ID NO: 6398 - DNA, 20 bp, Artificial Sequence
  Synthetic: descartes_2311_GABBR1
ggaagaagtacgtctggttc

SEQ ID NO: 6399 - DNA, 20 bp, Artificial Sequence
  Synthetic: descartes_2312_GABBR1
ttctcagatccagctgtgcc

SEQ ID NO: 6400 - DNA, 20 bp, Artificial Sequence
  Synthetic: descartes_2313_GABBR1
cgggcttcagtctcatagaa

SEQ ID NO: 6401 - DNA, 20 bp, Artificial Sequence
  Synthetic: descartes_2314_GABBR1
cgccagagtttcttctcaga

SEQ ID NO: 6402 - DNA, 20 bp, Artificial Sequence
  Synthetic: descartes_2315_GABBR1
tggagaaactaaccaagcga

SEQ ID NO: 6403 - DNA, 20 bp, Artificial Sequence
  Synthetic: descartes_2316_GABBR1
agtcgcttggttagtttctc

SEQ ID NO: 6404 - DNA, 20 bp, Artificial Sequence
  Synthetic: descartes_2317_GAPT
ggaggacctgcttccacatt

SEQ ID NO: 6405 - DNA, 20 bp, Artificial Sequence
  Synthetic: descartes_2318_GAPT
gaggagcatatctatggaaa

SEQ ID NO: 6406 - DNA, 20 bp, Artificial Sequence
  Synthetic: descartes_2319_GAPT
cagtgccaaacacacccaat

SEQ ID NO: 6407 - DNA, 20 bp, Artificial Sequence
  Synthetic: descartes_2320_GAPT
catagatatgctcctcgaaa

SEQ ID NO: 6408 - DNA, 20 bp, Artificial Sequence
  Synthetic: descartes_2321_GAPT
atagttgtcgtgtgtgttat

SEQ ID NO: 6409 - DNA, 20 bp, Artificial Sequence
  Synthetic: descartes_2322_GAPT
atatagttccttatcggttt

SEQ ID NO: 6410 - DNA, 20 bp, Artificial Sequence
  Synthetic: descartes_2323_GAPT
gctttgggaggacctgcttc

SEQ ID NO: 6411 - DNA, 20 bp, Artificial Sequence
  Synthetic: descartes_2324_GAPT
caaaggagaagcagcaggag

SEQ ID NO: 6412 - DNA, 20 bp, Artificial Sequence
  Synthetic: descartes_2325_GAS2
ccagagacaatacagcaaat

SEQ ID NO: 6413 - DNA, 20 bp, Artificial Sequence
  Synthetic: descartes_2326_GAS2
ggggtggatgaaacgtgtct

SEQ ID NO: 6414 - DNA, 20 bp, Artificial Sequence
  Synthetic: descartes_2327_GAS2
ccagcctcctcccacacgga

SEQ ID NO: 6415 - DNA, 20 bp, Artificial Sequence
  Synthetic: descartes_2328_GAS2
atccacccctaaatctcggc

SEQ ID NO: 6416 - DNA, 20 bp, Artificial Sequence
  Synthetic: descartes_2329_GAS2
ccatccacacgggagatctg

SEQ ID NO: 6417 - DNA, 20 bp, Artificial Sequence
  Synthetic: descartes_2330_GAS2
aacaaataccctgcaaaagt

SEQ ID NO: 6418 - DNA, 20 bp, Artificial Sequence
  Synthetic: descartes_2331_GAS2
ctgtattgtctctggcaaaa

SEQ ID NO: 6419 - DNA, 20 bp, Artificial Sequence
  Synthetic: descartes_2332_GAS2
ctaccaatgaaagaagatct

SEQ ID NO: 6420 - DNA, 20 bp, Artificial Sequence
  Synthetic: descartes_2333_GATA3
acatcgacggtcaaggcaac

SEQ ID NO: 6421 - DNA, 20 bp, Artificial Sequence
  Synthetic: descartes_2334_GATA3
acccggccgccctctccaga

SEQ ID NO: 6422 - DNA, 20 bp, Artificial Sequence
  Synthetic: descartes_2335_GATA3
tggtctggatgccttccttc

SEQ ID NO: 6423 - DNA, 20 bp, Artificial Sequence
  Synthetic: descartes_2336_GATA3
ggtttctggtctggatgcct

SEQ ID NO: 6424 - DNA, 20 bp, Artificial Sequence
  Synthetic: descartes_2337_GATA3
gaccacaccacccctccagc

SEQ ID NO: 6425 - DNA, 20 bp, Artificial Sequence
  Synthetic: descartes_2338_GATA3
tgatagagcccgcaggcgtt

SEQ ID NO: 6426 - DNA, 20 bp, Artificial Sequence
  Synthetic: descartes_2339_GATA3
cgtagtagggcgggacgtgg

SEQ ID NO: 6427 - DNA, 20 bp, Artificial Sequence
  Synthetic: descartes_2340_GATA3
ccgccgtccagccagggtag

SEQ ID NO: 6428 - DNA, 20 bp, Artificial Sequence
  Synthetic: descartes_2341_GBP1
acctgcccagactctgtatc

SEQ ID NO: 6429 - DNA, 20 bp, Artificial Sequence
  Synthetic: descartes_2342_GBP1
gtctggagatcctgtatctc

SEQ ID NO: 6430 - DNA, 20 bp, Artificial Sequence
  Synthetic: descartes_2343_GBP1
aagtatgtctgcagaatctc

SEQ ID NO: 6431 - DNA, 20 bp, Artificial Sequence
  Synthetic: descartes_2344_GBP1
agtcctctagaagaagaagt

SEQ ID NO: 6432 - DNA, 20 bp, Artificial Sequence
  Synthetic: descartes_2345_GBP1
gaataaattcccgccttcac

SEQ ID NO: 6433 - DNA, 20 bp, Artificial Sequence
  Synthetic: descartes_2346_GBP1
tgtgggcagctgcaccttct

SEQ ID NO: 6434 - DNA, 20 bp, Artificial Sequence
  Synthetic: descartes_2347_GBP1
tgtgagagtctggtctgtct

SEQ ID NO: 6435 - DNA, 20 bp, Artificial Sequence
  Synthetic: descartes_2348_GBP1
cctgtgcggtagaggcccac

SEQ ID NO: 6436 - DNA, 20 bp, Artificial Sequence
  Synthetic: descartes_2349_GCNT3
acagacacccactacctctc

SEQ ID NO: 6437 - DNA, 20 bp, Artificial Sequence
  Synthetic: descartes_2350_GCNT3
acccaaaggtagatgataat

SEQ ID NO: 6438 - DNA, 20 bp, Artificial Sequence
  Synthetic: descartes_2351_GCNT3
agagccacagtggccagcag

SEQ ID NO: 6439 - DNA, 20 bp, Artificial Sequence
  Synthetic: descartes_2352_GCNT3
aagaaccctaaatcccaaca

SEQ ID NO: 6440 - DNA, 20 bp, Artificial Sequence
  Synthetic: descartes_2353_GCNT3
ctataaagagcaatgcagag

SEQ ID NO: 6441 - DNA, 20 bp, Artificial Sequence
  Synthetic: descartes_2354_GCNT3
cagggaatgcgtacattgtg

SEQ ID NO: 6442 - DNA, 20 bp, Artificial Sequence
  Synthetic: descartes_2355_GCNT3
ctgaaacttccagcaaagag

SEQ ID NO: 6443 - DNA, 20 bp, Artificial Sequence
  Synthetic: descartes_2356_GCNT3
tggggacttctcatccacat

SEQ ID NO: 6444 - DNA, 20 bp, Artificial Sequence
  Synthetic: descartes_2357_GLMN
gctatgcttcagctgtatat

SEQ ID NO: 6445 - DNA, 20 bp, Artificial Sequence
  Synthetic: descartes_2358_GLMN
agtatggaacaggaagaaga

SEQ ID NO: 6446 - DNA, 20 bp, Artificial Sequence
  Synthetic: descartes_2359_GLMN
taagtactggtaaagtagac

SEQ ID NO: 6447 - DNA, 20 bp, Artificial Sequence
  Synthetic: descartes_2360_GLMN
tcccagagggtgcagaaaca

SEQ ID NO: 6448 - DNA, 20 bp, Artificial Sequence
  Synthetic: descartes_2361_GLMN
cagagggctcttcaatcagt

SEQ ID NO: 6449 - DNA, 20 bp, Artificial Sequence
  Synthetic: descartes_2362_GLMN
caggaccacagttgatttcc

SEQ ID NO: 6450 - DNA, 20 bp, Artificial Sequence
  Synthetic: descartes_2363_GLMN
atatggggcacattgaagtc

SEQ ID NO: 6451 - DNA, 20 bp, Artificial Sequence
  Synthetic: descartes_2364_GLMN
ccttgtgaatccaacttgtt

SEQ ID NO: 6452 - DNA, 20 bp, Artificial Sequence
  Synthetic: descartes_2365_GLYR1
gcttagcaggaaatgatgga

SEQ ID NO: 6453 - DNA, 20 bp, Artificial Sequence
  Synthetic: descartes_2366_GLYR1
aatggcagccaaccgcaagc

SEQ ID NO: 6454 - DNA, 20 bp, Artificial Sequence
  Synthetic: descartes_2367_GLYR1
tctgtgggtgtgatgctgcc

SEQ ID NO: 6455 - DNA, 20 bp, Artificial Sequence
  Synthetic: descartes_2368_GLYR1
gcaagttggagacgattcca

SEQ ID NO: 6456 - DNA, 20 bp, Artificial Sequence
  Synthetic: descartes_2369_GLYR1
gcctacttctctcctcactg

SEQ ID NO: 6457 - DNA, 20 bp, Artificial Sequence
  Synthetic: descartes_2370_GLYR1
agaggggatttggagcctct

SEQ ID NO: 6458 - DNA, 20 bp, Artificial Sequence
  Synthetic: descartes_2371_GLYR1
gagcctctctctgaagagcc

SEQ ID NO: 6459 - DNA, 20 bp, Artificial Sequence
  Synthetic: descartes_2372_GLYR1
gctctcctgaggaactcttc

SEQ ID NO: 6460 - DNA, 20 bp, Artificial Sequence
  Synthetic: descartes_2373_GNL1
atcccccaggctacagtgaa

SEQ ID NO: 6461 - DNA, 20 bp, Artificial Sequence
  Synthetic: descartes_2374_GNL1
ggtcgtagcctcgtggaccc

SEQ ID NO: 6462 - DNA, 20 bp, Artificial Sequence
  Synthetic: descartes_2375_GNL1
ctcgggacccccgcacccca

SEQ ID NO: 6463 - DNA, 20 bp, Artificial Sequence
  Synthetic: descartes_2376_GNL1
cctaatgtgggaaagtcctc

SEQ ID NO: 6464 - DNA, 20 bp, Artificial Sequence
  Synthetic: descartes_2377_GNL1
tcagaggagtaagccccatg

SEQ ID NO: 6465 - DNA, 20 bp, Artificial Sequence
  Synthetic: descartes_2378_GNL1
agagagacagcagggaggag

SEQ ID NO: 6466 - DNA, 20 bp, Artificial Sequence
  Synthetic: descartes_2379_GNL1
catcaacactatccccagct

SEQ ID NO: 6467 - DNA, 20 bp, Artificial Sequence
  Synthetic: descartes_2380_GNL1
tgagtatgtgactggagaac

SEQ ID NO: 6468 - DNA, 20 bp, Artificial Sequence
  Synthetic: descartes_2381_GNRH1
tgccagttgaccaacctctt

SEQ ID NO: 6469 - DNA, 20 bp, Artificial Sequence
  Synthetic: descartes_2382_GNRH1
ctccagggcgcagtccatag

SEQ ID NO: 6470 - DNA, 20 bp, Artificial Sequence
  Synthetic: descartes_2383_GNRH1
ggcatctctctttcctccag

SEQ ID NO: 6471 - DNA, 20 bp, Artificial Sequence
  Synthetic: descartes_2384_GNRH1
aggtctcggaggggagaacg

SEQ ID NO: 6472 - DNA, 20 bp, Artificial Sequence
  Synthetic: descartes_2385_GPAM
ccagcagctgtatggcatgc

SEQ ID NO: 6473 - DNA, 20 bp, Artificial Sequence
  Synthetic: descartes_2386_GPAM
ctgagaaccccaggtcaaaa

SEQ ID NO: 6474 - DNA, 20 bp, Artificial Sequence
  Synthetic: descartes_2387_GPAM
aaggagaccaaacaaaagag

SEQ ID NO: 6475 - DNA, 20 bp, Artificial Sequence
  Synthetic: descartes_2388_GPAM
cctggagcaagcgttgttac

SEQ ID NO: 6476 - DNA, 20 bp, Artificial Sequence
  Synthetic: descartes_2389_GPAM
gtaacattctaataacacct

SEQ ID NO: 6477 - DNA, 20 bp, Artificial Sequence
  Synthetic: descartes_2390_GPAM
attgatataaataacattcc

SEQ ID NO: 6478 - DNA, 20 bp, Artificial Sequence
  Synthetic: descartes_2391_GPAM
acagcattcttcacaagaca

SEQ ID NO: 6479 - DNA, 20 bp, Artificial Sequence
  Synthetic: descartes_2392_GPAM
agtcacattggtggcaaaca

SEQ ID NO: 6480 - DNA, 20 bp, Artificial Sequence
  Synthetic: descartes_2393_GPD2
acgtgagagccaaatgtgtt

SEQ ID NO: 6481 - DNA, 20 bp, Artificial Sequence
  Synthetic: descartes_2394_GPD2
gttgcaggaagcaattgcct

SEQ ID NO: 6482 - DNA, 20 bp, Artificial Sequence
  Synthetic: descartes_2395_GPD2
gggagatagactgagtatct

SEQ ID NO: 6483 - DNA, 20 bp, Artificial Sequence
  Synthetic: descartes_2396_GPD2
aaagcaggaccaagtagaac

SEQ ID NO: 6484 - DNA, 20 bp, Artificial Sequence
  Synthetic: descartes_2397_GPD2
gccacctcaaaggccttatc

SEQ ID NO: 6485 - DNA, 20 bp, Artificial Sequence
  Synthetic: descartes_2398_GPD2
atgcagaccagaaaggcttt

SEQ ID NO: 6486 - DNA, 20 bp, Artificial Sequence
  Synthetic: descartes_2399_GPD2
ccagggtaagaagaaaataa

SEQ ID NO: 6487 - DNA, 20 bp, Artificial Sequence
  Synthetic: descartes_2400_GPD2
ccaatgctccagaaggacaa

SEQ ID NO: 6488 - DNA, 20 bp, Artificial Sequence
  Synthetic: descartes_2401_GPNMB
cccgtcactgtcctctgacc

SEQ ID NO: 6489 - DNA, 20 bp, Artificial Sequence
  Synthetic: descartes_2402_GPNMB
ccatcagggaagacgttatg

SEQ ID NO: 6490 - DNA, 20 bp, Artificial Sequence
  Synthetic: descartes_2403_GPNMB
tgtgaacacagccaatgtga

SEQ ID NO: 6491 - DNA, 20 bp, Artificial Sequence
  Synthetic: descartes_2404_GPNMB
atgatgtgctgggcaatgaa

SEQ ID NO: 6492 - DNA, 20 bp, Artificial Sequence
  Synthetic: descartes_2405_GPNMB
atcaggaatcctactcagct

SEQ ID NO: 6493 - DNA, 20 bp, Artificial Sequence
  Synthetic: descartes_2406_GPNMB
atcagaagaccagccattta

SEQ ID NO: 6494 - DNA, 20 bp, Artificial Sequence
  Synthetic: descartes_2407_GPNMB
ctcaccaccccggatggaga

SEQ ID NO: 6495 - DNA, 20 bp, Artificial Sequence
  Synthetic: descartes_2408_GPNMB
gcggcatcaagtggcaatct

SEQ ID NO: 6496 - DNA, 20 bp, Artificial Sequence
  Synthetic: descartes_2409_GPR162
gtccccccaccaccccccac

SEQ ID NO: 6497 - DNA, 20 bp, Artificial Sequence
  Synthetic: descartes_2410_GPR162
tctatgactcactcacaggg

SEQ ID NO: 6498 - DNA, 20 bp, Artificial Sequence
  Synthetic: descartes_2411_GPR162
atgctaacggagccacagga

SEQ ID NO: 6499 - DNA, 20 bp, Artificial Sequence
  Synthetic: descartes_2412_GPR162
aggtaccagccattgtggtg

SEQ ID NO: 6500 - DNA, 20 bp, Artificial Sequence
  Synthetic: descartes_2413_GPR162
ggactaagcgcagggagacg

SEQ ID NO: 6501 - DNA, 20 bp, Artificial Sequence
  Synthetic: descartes_2414_GPR162
ttcaccccccgtcagggagc

SEQ ID NO: 6502 - DNA, 20 bp, Artificial Sequence
  Synthetic: descartes_2415_GPR162
tcccaggtactcaggaggac

SEQ ID NO: 6503 - DNA, 20 bp, Artificial Sequence
  Synthetic: descartes_2416_GPR162
cttcagcctcttgctacttg

SEQ ID NO: 6504 - DNA, 20 bp, Artificial Sequence
  Synthetic: descartes_2417_GPR180
actacagctataaccatgac

SEQ ID NO: 6505 - DNA, 20 bp, Artificial Sequence
  Synthetic: descartes_2418_GPR180
ctcctagtcctagtgtactt

SEQ ID NO: 6506 - DNA, 20 bp, Artificial Sequence
  Synthetic: descartes_2419_GPR180
aagatatcagtcatcatagc

SEQ ID NO: 6507 - DNA, 20 bp, Artificial Sequence
  Synthetic: descartes_2420_GPR180
tgcagacaagtatacatgcc

SEQ ID NO: 6508 - DNA, 20 bp, Artificial Sequence
  Synthetic: descartes_2421_GPR180
agtgtacttctctccactgt

SEQ ID NO: 6509 - DNA, 20 bp, Artificial Sequence
  Synthetic: descartes_2422_GPR180
gtaacaccatttcaaatggg

SEQ ID NO: 6510 - DNA, 20 bp, Artificial Sequence
  Synthetic: descartes_2423_GPR180
agtctatgcatgggttggac

SEQ ID NO: 6511 - DNA, 20 bp, Artificial Sequence
  Synthetic: descartes_2424_GPR180
gtagtcgctaaaaatgacag

SEQ ID NO: 6512 - DNA, 20 bp, Artificial Sequence
  Synthetic: descartes_2425_GPR183
ataggatatgtacttccact

SEQ ID NO: 6513 - DNA, 20 bp, Artificial Sequence
  Synthetic: descartes_2426_GPR183
cctacacgaatagcctacta

SEQ ID NO: 6514 - DNA, 20 bp, Artificial Sequence
  Synthetic: descartes_2427_GPR183
ccacgagcccaatgatgaag

SEQ ID NO: 6515 - DNA, 20 bp, Artificial Sequence
  Synthetic: descartes_2428_GPR183
gatactccatgcatgtaatc

SEQ ID NO: 6516 - DNA, 20 bp, Artificial Sequence
  Synthetic: descartes_2429_GPR183
ctccgccctctgcaactcct

SEQ ID NO: 6517 - DNA, 20 bp, Artificial Sequence
  Synthetic: descartes_2430_GPR183
ctggaatgtagccaaagaca

SEQ ID NO: 6518 - DNA, 20 bp, Artificial Sequence
  Synthetic: descartes_2431_GPR183
catgcaaagaagtagataaa

SEQ ID NO: 6519 - DNA, 20 bp, Artificial Sequence
  Synthetic: descartes_2432_GPR183
acaccttaccatgttgcaat

SEQ ID NO: 6520 - DNA, 20 bp, Artificial Sequence
  Synthetic: descartes_2433_GPR65
ggttacaaaacagtacagaa

SEQ ID NO: 6521 - DNA, 20 bp, Artificial Sequence
  Synthetic: descartes_2434_GPR65
atatattccacatatcatat

SEQ ID NO: 6522 - DNA, 20 bp, Artificial Sequence
  Synthetic: descartes_2435_GPR65
ctctatgcattaactctccc

SEQ ID NO: 6523 - DNA, 20 bp, Artificial Sequence
  Synthetic: descartes_2436_GPR65
atcttcccacaacatgacag

SEQ ID NO: 6524 - DNA, 20 bp, Artificial Sequence
  Synthetic: descartes_2437_GPR65
gagcatgctgtgaacttcga

SEQ ID NO: 6525 - DNA, 20 bp, Artificial Sequence
  Synthetic: descartes_2438_GPR65
gctgttgtctaccctttgaa

SEQ ID NO: 6526 - DNA, 20 bp, Artificial Sequence
  Synthetic: descartes_2439_GPR65
ctaaggacaagaagatttgc

SEQ ID NO: 6527 - DNA, 20 bp, Artificial Sequence
  Synthetic: descartes_2440_GPR65
tgtgtctacaaaagatacta

SEQ ID NO: 6528 - DNA, 20 bp, Artificial Sequence
  Synthetic: descartes_2441_GRAP2
actgcccaagccggtgccac

SEQ ID NO: 6529 - DNA, 20 bp, Artificial Sequence
  Synthetic: descartes_2442_GRAP2
acgaaggcctctctcgacac

SEQ ID NO: 6530 - DNA, 20 bp, Artificial Sequence
  Synthetic: descartes_2443_GRAP2
agtaaccaagaggagtggtt

SEQ ID NO: 6531 - DNA, 20 bp, Artificial Sequence
  Synthetic: descartes_2444_GRAP2
gggatggaaacttctcagtc

SEQ ID NO: 6532 - DNA, 20 bp, Artificial Sequence
  Synthetic: descartes_2445_GRAP2
tcctgtagtagtctaccagc

SEQ ID NO: 6533 - DNA, 20 bp, Artificial Sequence
  Synthetic: descartes_2446_GRAP2
actgcttcaggtgaggatga

SEQ ID NO: 6534 - DNA, 20 bp, Artificial Sequence
  Synthetic: descartes_2447_GRAP2
catccctaaataagctggta

SEQ ID NO: 6535 - DNA, 20 bp, Artificial Sequence
  Synthetic: descartes_2448_GRAP2
tgtggactgagaagtttcca

SEQ ID NO: 6536 - DNA, 20 bp, Artificial Sequence
  Synthetic: descartes_2449_GRB2
cattaagctctgccttgtac

SEQ ID NO: 6537 - DNA, 20 bp, Artificial Sequence
  Synthetic: descartes_2450_GRB2
tggagacagatgtagatctg

SEQ ID NO: 6538 - DNA, 20 bp, Artificial Sequence
  Synthetic: descartes_2451_GRB2
aacgaagaatgtgatcagaa

SEQ ID NO: 6539 - DNA, 20 bp, Artificial Sequence
  Synthetic: descartes_2452_GRB2
tccatgtcatggataactca

SEQ ID NO: 6540 - DNA, 20 bp, Artificial Sequence
  Synthetic: descartes_2453_GRB2
cccgcaattatgtcaccccc

SEQ ID NO: 6541 - DNA, 20 bp, Artificial Sequence
  Synthetic: descartes_2454_GRB2
gcaaaatccccagagccaag

SEQ ID NO: 6542 - DNA, 20 bp, Artificial Sequence
  Synthetic: descartes_2455_GRB2
gaaacgatgtgcagcacttc

SEQ ID NO: 6543 - DNA, 20 bp, Artificial Sequence
  Synthetic: descartes_2456_GRB2
tatgtagttcttgggaatga

SEQ ID NO: 6544 - DNA, 20 bp, Artificial Sequence
  Synthetic: descartes_2457_GRIK5
cctcccagccaccgcccact

SEQ ID NO: 6545 - DNA, 20 bp, Artificial Sequence
  Synthetic: descartes_2458_GRIK5
agactggagaaatgacagca

SEQ ID NO: 6546 - DNA, 20 bp, Artificial Sequence
  Synthetic: descartes_2459_GRIK5
gccccacgggaccagcctca

SEQ ID NO: 6547 - DNA, 20 bp, Artificial Sequence
  Synthetic: descartes_2460_GRIK5
ctcttgccccccactccagt

SEQ ID NO: 6548 - DNA, 20 bp, Artificial Sequence
  Synthetic: descartes_2461_GRIK5
tccgcagcctcaacatgtcc

SEQ ID NO: 6549 - DNA, 20 bp, Artificial Sequence
  Synthetic: descartes_2462_GRIK5
ctcctgcagcatcagttgtc

SEQ ID NO: 6550 - DNA, 20 bp, Artificial Sequence
  Synthetic: descartes_2463_GRIK5
ctagcagcatggacggctcc

SEQ ID NO: 6551 - DNA, 20 bp, Artificial Sequence
  Synthetic: descartes_2464_GRIK5
taggatgcgcagggtgtagt

SEQ ID NO: 6552 - DNA, 20 bp, Artificial Sequence
  Synthetic: descartes_2465_GTF3C4
gtgggaatatgagcacaata

SEQ ID NO: 6553 - DNA, 20 bp, Artificial Sequence
  Synthetic: descartes_2466_GTF3C4
agaggagacacagcatgcag

SEQ ID NO: 6554 - DNA, 20 bp, Artificial Sequence
  Synthetic: descartes_2467_GTF3C4
gagagcctgtaactggtctc

SEQ ID NO: 6555 - DNA, 20 bp, Artificial Sequence
  Synthetic: descartes_2468_GTF3C4
tgtgatccaggtgtgcagat

SEQ ID NO: 6556 - DNA, 20 bp, Artificial Sequence
  Synthetic: descartes_2469_GTF3C4
atagacctagtacgctggaa

SEQ ID NO: 6557 - DNA, 20 bp, Artificial Sequence
  Synthetic: descartes_2470_GTF3C4
atgtctgatgaagagtatga

SEQ ID NO: 6558 - DNA, 20 bp, Artificial Sequence
  Synthetic: descartes_2471_GTF3C4
aaagaggacagccaggagca

SEQ ID NO: 6559 - DNA, 20 bp, Artificial Sequence
  Synthetic: descartes_2472_GTF3C4
caagaagctttggaaaaaaa

SEQ ID NO: 6560 - DNA, 20 bp, Artificial Sequence
  Synthetic: descartes_2473_HAT1
tctgggtacacatagtaatt

SEQ ID NO: 6561 - DNA, 20 bp, Artificial Sequence
  Synthetic: descartes_2474_HAT1
gtagaatataagagtgcagt

SEQ ID NO: 6562 - DNA, 20 bp, Artificial Sequence
  Synthetic: descartes_2475_HAT1
atatccagtctgtagcttct

SEQ ID NO: 6563 - DNA, 20 bp, Artificial Sequence
  Synthetic: descartes_2476_HAT1
ccgggaaaaacagggcaaat

SEQ ID NO: 6564 - DNA, 20 bp, Artificial Sequence
  Synthetic: descartes_2477_HAT1
gttacaagggtctaaagatc

SEQ ID NO: 6565 - DNA, 20 bp, Artificial Sequence
  Synthetic: descartes_2478_HAT1
ctgaagatcttgaaaatgac

SEQ ID NO: 6566 - DNA, 20 bp, Artificial Sequence
  Synthetic: descartes_2479_HAT1
ccgggaaaaattaatgcaag

SEQ ID NO: 6567 - DNA, 20 bp, Artificial Sequence
  Synthetic: descartes_2480_HAT1
ttctccactgcactcttata

SEQ ID NO: 6568 - DNA, 20 bp, Artificial Sequence
  Synthetic: descartes_2481_HAVCR2
gccagtatctggatgtccaa

SEQ ID NO: 6569 - DNA, 20 bp, Artificial Sequence
  Synthetic: descartes_2482_HAVCR2
gatccggcagcagtagatcc

SEQ ID NO: 6570 - DNA, 20 bp, Artificial Sequence
  Synthetic: descartes_2483_HAVCR2
acctgaagttggtcatcaaa

SEQ ID NO: 6571 - DNA, 20 bp, Artificial Sequence
  Synthetic: descartes_2484_HAVCR2
atgaccaacttcaggttaaa

SEQ ID NO: 6572 - DNA, 20 bp, Artificial Sequence
  Synthetic: descartes_2485_HAVCR2
aatgtggcaacgtggtgctc

SEQ ID NO: 6573 - DNA, 20 bp, Artificial Sequence
  Synthetic: descartes_2486_HAVCR2
cgcaaaggagatgtgtccct

SEQ ID NO: 6574 - DNA, 20 bp, Artificial Sequence
  Synthetic: descartes_2487_HAVCR2
gccaacctccctccctcagg

SEQ ID NO: 6575 - DNA, 20 bp, Artificial Sequence
  Synthetic: descartes_2488_HAVCR2
acatcttccctttgactgtg

SEQ ID NO: 6576 - DNA, 20 bp, Artificial Sequence
  Synthetic: descartes_2489_HDAC1
ggtagagaccatagttgagc

SEQ ID NO: 6577 - DNA, 20 bp, Artificial Sequence
  Synthetic: descartes_2490_HDAC1
atgtagtcatcgctgtggta

SEQ ID NO: 6578 - DNA, 20 bp, Artificial Sequence
  Synthetic: descartes_2491_HDAC1
aagctccacatcagtccttc

SEQ ID NO: 6579 - DNA, 20 bp, Artificial Sequence
  Synthetic: descartes_2492_HDAC1
agttctgtcagttgtctact

SEQ ID NO: 6580 - DNA, 20 bp, Artificial Sequence
  Synthetic: descartes_2493_HDAC1
gcagttccaggatggccaag

SEQ ID NO: 6581 - DNA, 20 bp, Artificial Sequence
  Synthetic: descartes_2494_HDAC1
gcttctggcttctcctcctt

SEQ ID NO: 6582 - DNA, 20 bp, Artificial Sequence
  Synthetic: descartes_2495_HDAC1
atagttagattgaagcaacc

SEQ ID NO: 6583 - DNA, 20 bp, Artificial Sequence
  Synthetic: descartes_2496_HDAC1
ataagtatggagagtacttc

SEQ ID NO: 6584 - DNA, 20 bp, Artificial Sequence
  Synthetic: descartes_2497_HDAC10
ctgcgagagtcagatgcaga

SEQ ID NO: 6585 - DNA, 20 bp, Artificial Sequence
  Synthetic: descartes_2498_HDAC10
tgcttggcatgtgcagctgc

SEQ ID NO: 6586 - DNA, 20 bp, Artificial Sequence
  Synthetic: descartes_2499_HDAC10
actcagccatcggggaccct

SEQ ID NO: 6587 - DNA, 20 bp, Artificial Sequence
  Synthetic: descartes_2500_HDAC10
cacagctccagtgagcacag

SEQ ID NO: 6588 - DNA, 20 bp, Artificial Sequence
  Synthetic: descartes_2501_HDAC10
accctgagctggtgctggtc

SEQ ID NO: 6589 - DNA, 20 bp, Artificial Sequence
  Synthetic: descartes_2502_HDAC10
ctgagctgcatcttgggctt

SEQ ID NO: 6590 - DNA, 20 bp, Artificial Sequence
  Synthetic: descartes_2503_HDAC10
cttctcctggcaccgctatg

SEQ ID NO: 6591 - DNA, 20 bp, Artificial Sequence
  Synthetic: descartes_2504_HDAC10
actgcgcgcggctggccgca

SEQ ID NO: 6592 - DNA, 20 bp, Artificial Sequence
  Synthetic: descartes_2505_HDAC11
tgtgatggtagcaacagcaa

SEQ ID NO: 6593 - DNA, 20 bp, Artificial Sequence
  Synthetic: descartes_2506_HDAC11
ttgatgttcctctccacctt

SEQ ID NO: 6594 - DNA, 20 bp, Artificial Sequence
  Synthetic: descartes_2507_HDAC11
ctgttgctaccatcacagaa

SEQ ID NO: 6595 - DNA, 20 bp, Artificial Sequence
  Synthetic: descartes_2508_HDAC11
agcgtgtggagggcatctcc

SEQ ID NO: 6596 - DNA, 20 bp, Artificial Sequence
  Synthetic: descartes_2509_HDAC11
cggcatcaaagggatgcagc

SEQ ID NO: 6597 - DNA, 20 bp, Artificial Sequence
  Synthetic: descartes_2510_HDAC11
tgtttgagcgtgtggagggc

SEQ ID NO: 6598 - DNA, 20 bp, Artificial Sequence
  Synthetic: descartes_2511_HDAC11
gcctggggctcattgggcct

SEQ ID NO: 6599 - DNA, 20 bp, Artificial Sequence
  Synthetic: descartes_2512_HDAC11
ggaaattgatcactttgccc

SEQ ID NO: 6600 - DNA, 20 bp, Artificial Sequence
  Synthetic: descartes_2513_HDAC2
tgtataagccataatttaac

SEQ ID NO: 6601 - DNA, 20 bp, Artificial Sequence
  Synthetic: descartes_2514_HDAC2
caatgagagatggtatagat

SEQ ID NO: 6602 - DNA, 20 bp, Artificial Sequence
  Synthetic: descartes_2515_HDAC2
aagtctggtccaaaatactc

SEQ ID NO: 6603 - DNA, 20 bp, Artificial Sequence
  Synthetic: descartes_2516_HDAC2
acttaccattactgatgctt

SEQ ID NO: 6604 - DNA, 20 bp, Artificial Sequence
  Synthetic: descartes_2517_HDAC2
tacggtcaataagaccagat

SEQ ID NO: 6605 - DNA, 20 bp, Artificial Sequence
  Synthetic: descartes_2518_HDAC2
atatactcatcactgtgata

SEQ ID NO: 6606 - DNA, 20 bp, Artificial Sequence
  Synthetic: descartes_2519_HDAC2
gaccagacttcaaactgcat

SEQ ID NO: 6607 - DNA, 20 bp, Artificial Sequence
  Synthetic: descartes_2520_HDAC2
accactgttgtccttggatt

SEQ ID NO: 6608 - DNA, 20 bp, Artificial Sequence
  Synthetic: descartes_2521_HDAC3
ggacagtataaccaccacca

SEQ ID NO: 6609 - DNA, 20 bp, Artificial Sequence
  Synthetic: descartes_2522_HDAC3
ccccagacttcacacttcat

SEQ ID NO: 6610 - DNA, 20 bp, Artificial Sequence
  Synthetic: descartes_2523_HDAC3
cttgtcattgtcatggtctc

SEQ ID NO: 6611 - DNA, 20 bp, Artificial Sequence
  Synthetic: descartes_2524_HDAC3
cagccggttatcaaccaggt

SEQ ID NO: 6612 - DNA, 20 bp, Artificial Sequence
  Synthetic: descartes_2525_HDAC3
tacctcactgaccgggtcat

SEQ ID NO: 6613 - DNA, 20 bp, Artificial Sequence
  Synthetic: descartes_2526_HDAC3
aaagattgtctggcggatct

SEQ ID NO: 6614 - DNA, 20 bp, Artificial Sequence
  Synthetic: descartes_2527_HDAC3
tacgaccccgacgtgggcaa

SEQ ID NO: 6615 - DNA, 20 bp, Artificial Sequence
  Synthetic: descartes_2528_HDAC3
ccgggctctttgagttctgc

SEQ ID NO: 6616 - DNA, 20 bp, Artificial Sequence
  Synthetic: descartes_2529_HDAC4
cccggcacccacctcactcc

SEQ ID NO: 6617 - DNA, 20 bp, Artificial Sequence
  Synthetic: descartes_2530_HDAC4
ccagcaaggcagaaacacat

SEQ ID NO: 6618 - DNA, 20 bp, Artificial Sequence
  Synthetic: descartes_2531_HDAC4
cagcaaagacccaatgcaaa

SEQ ID NO: 6619 - DNA, 20 bp, Artificial Sequence
  Synthetic: descartes_2532_HDAC4
tggagaaacacaagcagcag

SEQ ID NO: 6620 - DNA, 20 bp, Artificial Sequence
  Synthetic: descartes_2533_HDAC4
ctaagagggaagtcatcttt

SEQ ID NO: 6621 - DNA, 20 bp, Artificial Sequence
  Synthetic: descartes_2534_HDAC4
cagcgaccctcgctactggt

SEQ ID NO: 6622 - DNA, 20 bp, Artificial Sequence
  Synthetic: descartes_2535_HDAC4
gcctggaccgtaatttcaga

SEQ ID NO: 6623 - DNA, 20 bp, Artificial Sequence
  Synthetic: descartes_2536_HDAC4
tccatggaacggacagcgtt

SEQ ID NO: 6624 - DNA, 20 bp, Artificial Sequence
  Synthetic: descartes_2537_HDAC5
gcatgaacgtgtcgtagacc

SEQ ID NO: 6625 - DNA, 20 bp, Artificial Sequence
  Synthetic: descartes_2538_HDAC5
tatccagcaccaggctcctc

SEQ ID NO: 6626 - DNA, 20 bp, Artificial Sequence
  Synthetic: descartes_2539_HDAC5
gccttgaacgcactttcaag

SEQ ID NO: 6627 - DNA, 20 bp, Artificial Sequence
  Synthetic: descartes_2540_HDAC5
ccatcatccggcccccagga

SEQ ID NO: 6628 - DNA, 20 bp, Artificial Sequence
  Synthetic: descartes_2541_HDAC5
ctggctcagtccccaacatc

SEQ ID NO: 6629 - DNA, 20 bp, Artificial Sequence
  Synthetic: descartes_2542_HDAC5
cctgggccctacgacagtcg

SEQ ID NO: 6630 - DNA, 20 bp, Artificial Sequence
  Synthetic: descartes_2543_HDAC5
agaagagagctgttgagatc

SEQ ID NO: 6631 - DNA, 20 bp, Artificial Sequence
  Synthetic: descartes_2544_HDAC5
cggtgatggctacagagttg

SEQ ID NO: 6632 - DNA, 20 bp, Artificial Sequence
  Synthetic: descartes_2545_HDAC6
gtggcagtatgccccatacc

SEQ ID NO: 6633 - DNA, 20 bp, Artificial Sequence
  Synthetic: descartes_2546_HDAC6
ggccaaggccaaggatatac

SEQ ID NO: 6634 - DNA, 20 bp, Artificial Sequence
  Synthetic: descartes_2547_HDAC6
gtcatagaccagccctgtgc

SEQ ID NO: 6635 - DNA, 20 bp, Artificial Sequence
  Synthetic: descartes_2548_HDAC6
cccatgcctgcttccagaac

SEQ ID NO: 6636 - DNA, 20 bp, Artificial Sequence
  Synthetic: descartes_2549_HDAC6
gggaggatatgccccaccca

SEQ ID NO: 6637 - DNA, 20 bp, Artificial Sequence
  Synthetic: descartes_2550_HDAC6
tctgtggcccggagatgacc

SEQ ID NO: 6638 - DNA, 20 bp, Artificial Sequence
  Synthetic: descartes_2551_HDAC6
actccatctatatctgcccc

SEQ ID NO: 6639 - DNA, 20 bp, Artificial Sequence
  Synthetic: descartes_2552_HDAC6
actgctcatccaacaccaag

SEQ ID NO: 6640 - DNA, 20 bp, Artificial Sequence
  Synthetic: descartes_2553_HDAC7
gcagaaacatggtagccacc

SEQ ID NO: 6641 - DNA, 20 bp, Artificial Sequence
  Synthetic: descartes_2554_HDAC7
gatacatgacgcagcaactg

SEQ ID NO: 6642 - DNA, 20 bp, Artificial Sequence
  Synthetic: descartes_2555_HDAC7
cctcctgttcccagcctgcc

SEQ ID NO: 6643 - DNA, 20 bp, Artificial Sequence
  Synthetic: descartes_2556_HDAC7
agaagaaggctggaaacaga

SEQ ID NO: 6644 - DNA, 20 bp, Artificial Sequence
  Synthetic: descartes_2557_HDAC7
agaatcacctccgctagctt

SEQ ID NO: 6645 - DNA, 20 bp, Artificial Sequence
  Synthetic: descartes_2558_HDAC7
ggagcagtggattcttcctc

SEQ ID NO: 6646 - DNA, 20 bp, Artificial Sequence
  Synthetic: descartes_2559_HDAC7
ctgggtgccgttgccatggt

SEQ ID NO: 6647 - DNA, 20 bp, Artificial Sequence
  Synthetic: descartes_2560_HDAC7
cccagtccttaatgaccacc

SEQ ID NO: 6648 - DNA, 20 bp, Artificial Sequence
  Synthetic: descartes_2561_HDAC8
cctaggatgaccccggtcaa

SEQ ID NO: 6649 - DNA, 20 bp, Artificial Sequence
  Synthetic: descartes_2562_HDAC8
acagcatatggtcctgatta

SEQ ID NO: 6650 - DNA, 20 bp, Artificial Sequence
  Synthetic: descartes_2563_HDAC8
acctccaaagtcatgaccgt

SEQ ID NO: 6651 - DNA, 20 bp, Artificial Sequence
  Synthetic: descartes_2564_HDAC8
ggattaaaggcttggtatac

SEQ ID NO: 6652 - DNA, 20 bp, Artificial Sequence
  Synthetic: descartes_2565_HDAC8
atcttgtatgccatcctgaa

SEQ ID NO: 6653 - DNA, 20 bp, Artificial Sequence
  Synthetic: descartes_2566_HDAC8
attgaagcatatgcactgca

SEQ ID NO: 6654 - DNA, 20 bp, Artificial Sequence
  Synthetic: descartes_2567_HDAC8
gaggtgaaactgaatgcgtc

SEQ ID NO: 6655 - DNA, 20 bp, Artificial Sequence
  Synthetic: descartes_2568_HDAC8
acatgactccagtgggaatt

SEQ ID NO: 6656 - DNA, 20 bp, Artificial Sequence
  Synthetic: descartes_2569_HDAC9
cctggcagtggagccccaaa

SEQ ID NO: 6657 - DNA, 20 bp, Artificial Sequence
  Synthetic: descartes_2570_HDAC9
tgctgaccccagcatcctgt

SEQ ID NO: 6658 - DNA, 20 bp, Artificial Sequence
  Synthetic: descartes_2571_HDAC9
acagcaacgcattctaattc

SEQ ID NO: 6659 - DNA, 20 bp, Artificial Sequence
  Synthetic: descartes_2572_HDAC9
gaagggggaaatcatccttt

SEQ ID NO: 6660 - DNA, 20 bp, Artificial Sequence
  Synthetic: descartes_2573_HDAC9
gagggaaagccacccaacag

SEQ ID NO: 6661 - DNA, 20 bp, Artificial Sequence
  Synthetic: descartes_2574_HDAC9
acctggcattagaggtaccc

SEQ ID NO: 6662 - DNA, 20 bp, Artificial Sequence
  Synthetic: descartes_2575_HDAC9
acctggaccgcaccttcaag

SEQ ID NO: 6663 - DNA, 20 bp, Artificial Sequence
  Synthetic: descartes_2576_HDAC9
cctcacccagcaatggaccg

SEQ ID NO: 6664 - DNA, 20 bp, Artificial Sequence
  Synthetic: descartes_2577_HDGF
acggcagcctcaggcatctc

SEQ ID NO: 6665 - DNA, 20 bp, Artificial Sequence
  Synthetic: descartes_2578_HDGF
gcaagcccaacaagaggaaa

SEQ ID NO: 6666 - DNA, 20 bp, Artificial Sequence
  Synthetic: descartes_2579_HDGF
gtagccaggagatggccaag

SEQ ID NO: 6667 - DNA, 20 bp, Artificial Sequence
  Synthetic: descartes_2580_HDGF
agccctacgtccgcctttgc

SEQ ID NO: 6668 - DNA, 20 bp, Artificial Sequence
  Synthetic: descartes_2581_HDGF
tgcctcaactccttggccat

SEQ ID NO: 6669 - DNA, 20 bp, Artificial Sequence
  Synthetic: descartes_2582_HDGF
tgcctccttgggacgtttag

SEQ ID NO: 6670 - DNA, 20 bp, Artificial Sequence
  Synthetic: descartes_2583_HDGF
ctccttagcaaaggcggacg

SEQ ID NO: 6671 - DNA, 20 bp, Artificial Sequence
  Synthetic: descartes_2584_HDGF
ctaaggaggaaacgcttgag

SEQ ID NO: 6672 - DNA, 20 bp, Artificial Sequence
  Synthetic: descartes_2585_HDGFL1
ccacagccccgcgctgaagc

SEQ ID NO: 6673 - DNA, 20 bp, Artificial Sequence
  Synthetic: descartes_2586_HDGFL1
ttcgggacccacgagacggc

SEQ ID NO: 6674 - DNA, 20 bp, Artificial Sequence
  Synthetic: descartes_2587_HDGFL1
ggactcaggaaggccgtctc

SEQ ID NO: 6675 - DNA, 20 bp, Artificial Sequence
  Synthetic: descartes_2588_HDGFL1
acttggcaaacaccaggtcc

SEQ ID NO: 6676 - DNA, 20 bp, Artificial Sequence
  Synthetic: descartes_2589_HDGFL1
ccaagttaaagggctatgcc

SEQ ID NO: 6677 - DNA, 20 bp, Artificial Sequence
  Synthetic: descartes_2590_HDGFL1
ggggcgtcctccggcgggtc

SEQ ID NO: 6678 - DNA, 20 bp, Artificial Sequence
  Synthetic: descartes_2591_HDGFL2
gtgtgtgccaaagaaaaaga

SEQ ID NO: 6679 - DNA, 20 bp, Artificial Sequence
  Synthetic: descartes_2592_HDGFL2
cgtccccccagagggcccct

SEQ ID NO: 6680 - DNA, 20 bp, Artificial Sequence
  Synthetic: descartes_2593_HDGFL2
ctggcgggctctgtgcttga

SEQ ID NO: 6681 - DNA, 20 bp, Artificial Sequence
  Synthetic: descartes_2594_HDGFL2
gggcaaacttgatctcactg

SEQ ID NO: 6682 - DNA, 20 bp, Artificial Sequence
  Synthetic: descartes_2595_HDGFL2
ggccgaggacccgcgacttg

SEQ ID NO: 6683 - DNA, 20 bp, Artificial Sequence
  Synthetic: descartes_2596_HDGFL2
gcgcaggcgtcttcctcttc

SEQ ID NO: 6684 - DNA, 20 bp, Artificial Sequence
  Synthetic: descartes_2597_HDGFL2
tcgtaggggaacaggtcctt

SEQ ID NO: 6685 - DNA, 20 bp, Artificial Sequence
  Synthetic: descartes_2598_HDGFL2
ttcttctctaccttcctgtc

SEQ ID NO: 6686 - DNA, 20 bp, Artificial Sequence
  Synthetic: descartes_2599_HDGFL3
catataaggagtacaaagac

SEQ ID NO: 6687 - DNA, 20 bp, Artificial Sequence
  Synthetic: descartes_2600_HDGFL3
atgggtgccaaaaaagaaga

SEQ ID NO: 6688 - DNA, 20 bp, Artificial Sequence
  Synthetic: descartes_2601_HDGFL3
tgaagagctctgttgctgaa

SEQ ID NO: 6689 - DNA, 20 bp, Artificial Sequence
  Synthetic: descartes_2602_HDGFL3
ccacaatccttcgttaaatc

SEQ ID NO: 6690 - DNA, 20 bp, Artificial Sequence
  Synthetic: descartes_2603_HDGFL3
acgaaggattgtgggaaata

SEQ ID NO: 6691 - DNA, 20 bp, Artificial Sequence
  Synthetic: descartes_2604_HDGFL3
gaaagtcaaacaaacggaaa

SEQ ID NO: 6692 - DNA, 20 bp, Artificial Sequence
  Synthetic: descartes_2605_HDGFL3
ctggaggcttcacagcgccc

SEQ ID NO: 6693 - DNA, 20 bp, Artificial Sequence
  Synthetic: descartes_2606_HDGFL3
tatttcccacaatccttcgt

SEQ ID NO: 6694 - DNA, 20 bp, Artificial Sequence
  Synthetic: descartes_2607_HES1
agctggctcagactttcatt

SEQ ID NO: 6695 - DNA, 20 bp, Artificial Sequence
  Synthetic: descartes_2608_HES1
gaggcttccaggtggtaccg

SEQ ID NO: 6696 - DNA, 20 bp, Artificial Sequence
  Synthetic: descartes_2609_HES1
tccggtgtcgtgttgacact

SEQ ID NO: 6697 - DNA, 20 bp, Artificial Sequence
  Synthetic: descartes_2610_HES1
cagaatgtccgccttctcca

SEQ ID NO: 6698 - DNA, 20 bp, Artificial Sequence
  Synthetic: descartes_2611_HES1
tgtgctcagatgctgtcttt

SEQ ID NO: 6699 - DNA, 20 bp, Artificial Sequence
  Synthetic: descartes_2612_HES1
ttcagagcatccaaaatcag

SEQ ID NO: 6700 - DNA, 20 bp, Artificial Sequence
  Synthetic: descartes_2613_HES1
ctttcctcattcccaacggg

SEQ ID NO: 6701 - DNA, 20 bp, Artificial Sequence
  Synthetic: descartes_2614_HES1
gtttatccggtgtcgtgttg

SEQ ID NO: 6702 - DNA, 20 bp, Artificial Sequence
  Synthetic: descartes_2615_HFE
cataatagtccagaagtcaa

SEQ ID NO: 6703 - DNA, 20 bp, Artificial Sequence
  Synthetic: descartes_2616_HFE
acagcccaggatgacctgca

SEQ ID NO: 6704 - DNA, 20 bp, Artificial Sequence
  Synthetic: descartes_2617_HFE
gtgaaggtgacacatcatgt

SEQ ID NO: 6705 - DNA, 20 bp, Artificial Sequence
  Synthetic: descartes_2618_HFE
aagccagatgtggctgcagc

SEQ ID NO: 6706 - DNA, 20 bp, Artificial Sequence
  Synthetic: descartes_2619_HFE
ggttcgaactccttggcatc

SEQ ID NO: 6707 - DNA, 20 bp, Artificial Sequence
  Synthetic: descartes_2620_HFE
ggctacgtggatgaccagct

SEQ ID NO: 6708 - DNA, 20 bp, Artificial Sequence
  Synthetic: descartes_2621_HFE
cagtagaatttcaagccaga

SEQ ID NO: 6709 - DNA, 20 bp, Artificial Sequence
  Synthetic: descartes_2622_HFE
agactctgactcagctgcag

SEQ ID NO: 6710 - DNA, 20 bp, Artificial Sequence
  Synthetic: descartes_2623_HHLA2
accaaaccaagacttcaaag

SEQ ID NO: 6711 - DNA, 20 bp, Artificial Sequence
  Synthetic: descartes_2624_HHLA2
agaggggatccgaagtcgta

SEQ ID NO: 6712 - DNA, 20 bp, Artificial Sequence
  Synthetic: descartes_2625_HHLA2
tattaacagcccactgaata

SEQ ID NO: 6713 - DNA, 20 bp, Artificial Sequence
  Synthetic: descartes_2626_HHLA2
cttaccatccacacagtgca

SEQ ID NO: 6714 - DNA, 20 bp, Artificial Sequence
  Synthetic: descartes_2627_HHLA2
actctcatgtcaacctgtaa

SEQ ID NO: 6715 - DNA, 20 bp, Artificial Sequence
  Synthetic: descartes_2628_HHLA2
agaagagtaagccttctgga

SEQ ID NO: 6716 - DNA, 20 bp, Artificial Sequence
  Synthetic: descartes_2629_HHLA2
agagataggtgtgttgtcca

SEQ ID NO: 6717 - DNA, 20 bp, Artificial Sequence
  Synthetic: descartes_2630_HHLA2
gaaagccaagatcccagata

SEQ ID NO: 6718 - DNA, 20 bp, Artificial Sequence
  Synthetic: descartes_2631_HLA-DMB
acatactgcatctccttcaa

SEQ ID NO: 6719 - DNA, 20 bp, Artificial Sequence
  Synthetic: descartes_2632_HLA-DMB
gagtcccagcatcatccaac

SEQ ID NO: 6720 - DNA, 20 bp, Artificial Sequence
  Synthetic: descartes_2633_HLA-DMB
gttgaggtgctgtgagagga

SEQ ID NO: 6721 - DNA, 20 bp, Artificial Sequence
  Synthetic: descartes_2634_HLA-DMB
gccttaaccccctcttacgg

SEQ ID NO: 6722 - DNA, 20 bp, Artificial Sequence
  Synthetic: descartes_2635_HLA-DMB
acacgagggagcctgtgatg

SEQ ID NO: 6723 - DNA, 20 bp, Artificial Sequence
  Synthetic: descartes_2636_HLA-DMB
tgtgtctgcagtgactctgg

SEQ ID NO: 6724 - DNA, 20 bp, Artificial Sequence
  Synthetic: descartes_2637_HLA-DMB
gggtgctgaatagcttggcg

SEQ ID NO: 6725 - DNA, 20 bp, Artificial Sequence
  Synthetic: descartes_2638_HLA-DPA1
tacagacgcatagaccaaca

SEQ ID NO: 6726 - DNA, 20 bp, Artificial Sequence
  Synthetic: descartes_2639_HLA-DPA1
ccaaggagcctgtggagctg

SEQ ID NO: 6727 - DNA, 20 bp, Artificial Sequence
  Synthetic: descartes_2640_HLA-DPA1
atgaagatgagatgttctat

SEQ ID NO: 6728 - DNA, 20 bp, Artificial Sequence
  Synthetic: descartes_2641_HLA-DPA1
tgatgaggacggtgcccacg

SEQ ID NO: 6729 - DNA, 20 bp, Artificial Sequence
  Synthetic: descartes_2642_HLA-DPA1
ctgctgagtctccgaggagc

SEQ ID NO: 6730 - DNA, 20 bp, Artificial Sequence
  Synthetic: descartes_2643_HLA-DPA1
tgccctcagcagaggacttc

SEQ ID NO: 6731 - DNA, 20 bp, Artificial Sequence
  Synthetic: descartes_2644_HLA-DPA1
gccaagccttttcctttgag

SEQ ID NO: 6732 - DNA, 20 bp, Artificial Sequence
  Synthetic: descartes_2645_HLA-DPA1
tgtttgaatttgatgaagat

SEQ ID NO: 6733 - DNA, 20 bp, Artificial Sequence
  Synthetic: descartes_2646_HLA-DPB1
ctcctgtccattcaggaacc

SEQ ID NO: 6734 - DNA, 20 bp, Artificial Sequence
  Synthetic: descartes_2647_HLA-DPB1
atgggacacagcgcttcctg

SEQ ID NO: 6735 - DNA, 20 bp, Artificial Sequence
  Synthetic: descartes_2648_HLA-DPB1
cagggacggcaggaatgcta

SEQ ID NO: 6736 - DNA, 20 bp, Artificial Sequence
  Synthetic: descartes_2649_HLA-DPB1
cccctccaagaaggggccct

SEQ ID NO: 6737 - DNA, 20 bp, Artificial Sequence
  Synthetic: descartes_2650_HLA-DPB1
tacccaggcagcattcaagt

SEQ ID NO: 6738 - DNA, 20 bp, Artificial Sequence
  Synthetic: descartes_2651_HLA-DPB1
cagcatcaccaggatctgga

SEQ ID NO: 6739 - DNA, 20 bp, Artificial Sequence
  Synthetic: descartes_2652_HLA-DPB1
tgcggccccccggacagtgg

SEQ ID NO: 6740 - DNA, 20 bp, Artificial Sequence
  Synthetic: descartes_2653_HLA-DPB1
ttgctcctcctgtgcatgaa

SEQ ID NO: 6741 - DNA, 20 bp, Artificial Sequence
  Synthetic: descartes_2654_HLA-DQA1
tgagaccagcttcctctcca

SEQ ID NO: 6742 - DNA, 20 bp, Artificial Sequence
  Synthetic: descartes_2655_HLA-DQA1
atggagatgagcagttctac

SEQ ID NO: 6743 - DNA, 20 bp, Artificial Sequence
  Synthetic: descartes_2656_HLA-DQA1
acccgcagggtgcactgaga

SEQ ID NO: 6744 - DNA, 20 bp, Artificial Sequence
  Synthetic: descartes_2657_HLA-DQA1
cggtccctctggccagtaca

SEQ ID NO: 6745 - DNA, 20 bp, Artificial Sequence
  Synthetic: descartes_2658_HLA-DQA1
agaagaggctggtccaggcc

SEQ ID NO: 6746 - DNA, 20 bp, Artificial Sequence
  Synthetic: descartes_2659_HLA-DQA1
tcttgtggacaacatctttc

SEQ ID NO: 6747 - DNA, 20 bp, Artificial Sequence
  Synthetic: descartes_2660_HLA-DQA1
tcagtgcaccctgcgggtca

SEQ ID NO: 6748 - DNA, 20 bp, Artificial Sequence
  Synthetic: descartes_2661_HLA-DQA1
caagtctcccgtgacactgg

SEQ ID NO: 6749 - DNA, 20 bp, Artificial Sequence
  Synthetic: descartes_2662_HLA-DQA2
tgagaccagcttcctctcca

SEQ ID NO: 6750 - DNA, 20 bp, Artificial Sequence
  Synthetic: descartes_2663_HLA-DQA2
acccgcagagtgcactgaga

SEQ ID NO: 6751 - DNA, 20 bp, Artificial Sequence
  Synthetic: descartes_2664_HLA-DQA2
ctgtgacgctgggtcagccc

SEQ ID NO: 6752 - DNA, 20 bp, Artificial Sequence
  Synthetic: descartes_2665_HLA-DQA2
atggagacgaggagttctat

SEQ ID NO: 6753 - DNA, 20 bp, Artificial Sequence
  Synthetic: descartes_2666_HLA-DQA2
gtctccaggtccacatagaa

SEQ ID NO: 6754 - DNA, 20 bp, Artificial Sequence
  Synthetic: descartes_2667_HLA-DQA2
agaagaggctcgtccaggcc

SEQ ID NO: 6755 - DNA, 20 bp, Artificial Sequence
  Synthetic: descartes_2668_HLA-DQA2
ctaaacataggcaactgcca

SEQ ID NO: 6756 - DNA, 20 bp, Artificial Sequence
  Synthetic: descartes_2669_HLA-DQA2
gtctgcgccctggggttgtc

SEQ ID NO: 6757 - DNA, 20 bp, Artificial Sequence
  Synthetic: descartes_2670_HLA-DQB1
agggcatgtgctacttcacc

SEQ ID NO: 6758 - DNA, 20 bp, Artificial Sequence
  Synthetic: descartes_2671_HLA-DQB1
tatccaggccagatcaaagt

SEQ ID NO: 6759 - DNA, 20 bp, Artificial Sequence
  Synthetic: descartes_2672_HLA-DQB1
ggaatgatcaggaggagaca

SEQ ID NO: 6760 - DNA, 20 bp, Artificial Sequence
  Synthetic: descartes_2673_HLA-DQB1
atctggcctggatagaaatc

SEQ ID NO: 6761 - DNA, 20 bp, Artificial Sequence
  Synthetic: descartes_2674_HLA-DQB1
cagcatcaccaggatctgga

SEQ ID NO: 6762 - DNA, 20 bp, Artificial Sequence
  Synthetic: descartes_2675_HLA-DQB1
gtgttccagtttaagggcat

SEQ ID NO: 6763 - DNA, 20 bp, Artificial Sequence
  Synthetic: descartes_2676_HLA-DQB1
cagatcctggtgatgctgga

SEQ ID NO: 6764 - DNA, 20 bp, Artificial Sequence
  Synthetic: descartes_2677_HLA-DQB1
tgactcctttgacggatgat

SEQ ID NO: 6765 - DNA, 20 bp, Artificial Sequence
  Synthetic: descartes_2678_HLA-DQB2
agggcatgtgctacttcacc

SEQ ID NO: 6766 - DNA, 20 bp, Artificial Sequence
  Synthetic: descartes_2679_HLA-DQB2
ggaatgaccaggaggagaca

SEQ ID NO: 6767 - DNA, 20 bp, Artificial Sequence
  Synthetic: descartes_2680_HLA-DQB2
tatccagcccagatcaaagt

SEQ ID NO: 6768 - DNA, 20 bp, Artificial Sequence
  Synthetic: descartes_2681_HLA-DQB2
tgacccctgtgacggatgat

SEQ ID NO: 6769 - DNA, 20 bp, Artificial Sequence
  Synthetic: descartes_2682_HLA-DQB2
atctgggctggatagaaatc

SEQ ID NO: 6770 - DNA, 20 bp, Artificial Sequence
  Synthetic: descartes_2683_HLA-DQB2
cagcatcaccagaatctgga

SEQ ID NO: 6771 - DNA, 20 bp, Artificial Sequence
  Synthetic: descartes_2684_HLA-DQB2
ggcagcagctgtgaccgtga

SEQ ID NO: 6772 - DNA, 20 bp, Artificial Sequence
  Synthetic: descartes_2685_HLA-DQB2
ttggtccagtttaagggcat

SEQ ID NO: 6773 - DNA, 20 bp, Artificial Sequence
  Synthetic: descartes_2686_HLA-DRA
atgctccaagccctctccca

SEQ ID NO: 6774 - DNA, 20 bp, Artificial Sequence
  Synthetic: descartes_2687_HLA-DRA
cgcaatcccttgatgatgaa

SEQ ID NO: 6775 - DNA, 20 bp, Artificial Sequence
  Synthetic: descartes_2688_HLA-DRA
tgagcacagttacctctgga

SEQ ID NO: 6776 - DNA, 20 bp, Artificial Sequence
  Synthetic: descartes_2689_HLA-DRA
atagacaagttcaccccacc

SEQ ID NO: 6777 - DNA, 20 bp, Artificial Sequence
  Synthetic: descartes_2690_HLA-DRA
gaagccacgtgacattgacc

SEQ ID NO: 6778 - DNA, 20 bp, Artificial Sequence
  Synthetic: descartes_2691_HLA-DRA
catttcgaagccacgtgaca

SEQ ID NO: 6779 - DNA, 20 bp, Artificial Sequence
  Synthetic: descartes_2692_HLA-DRA
cgcaagttccactatctccc

SEQ ID NO: 6780 - DNA, 20 bp, Artificial Sequence
  Synthetic: descartes_2693_HLA-DRA
cgactgcagggtggagcact

SEQ ID NO: 6781 - DNA, 20 bp, Artificial Sequence
  Synthetic: descartes_2694_HLA-DRB1
ctgtggcagcctaagaggga

SEQ ID NO: 6782 - DNA, 20 bp, Artificial Sequence
  Synthetic: descartes_2695_HLA-DRB1
cacctgccaagtggagcacc

SEQ ID NO: 6783 - DNA, 20 bp, Artificial Sequence
  Synthetic: descartes_2696_HLA-DRB1
tatccaggcagcattgaagt

SEQ ID NO: 6784 - DNA, 20 bp, Artificial Sequence
  Synthetic: descartes_2697_HLA-DRB1
cagcatcaccagggtctgga

SEQ ID NO: 6785 - DNA, 20 bp, Artificial Sequence
  Synthetic: descartes_2698_HLA-DRB1
aaggatatacagtcacctta

SEQ ID NO: 6786 - DNA, 20 bp, Artificial Sequence
  Synthetic: descartes_2699_HLA-DRB1
ttcaatgggacggagcgggt

SEQ ID NO: 6787 - DNA, 20 bp, Artificial Sequence
  Synthetic: descartes_2700_HLA-DRB1
tgctgggcctgctcttcctt

SEQ ID NO: 6788 - DNA, 20 bp, Artificial Sequence
  Synthetic: descartes_2701_HLA-DRB1
tgattcctgaagtagatgaa

SEQ ID NO: 6789 - DNA, 20 bp, Artificial Sequence
  Synthetic: descartes_2702_HLA-DRB5
cacctgccaagtggagcacc

SEQ ID NO: 6790 - DNA, 20 bp, Artificial Sequence
  Synthetic: descartes_2703_HLA-DRB5
tatccaggcagcattgaagt

SEQ ID NO: 6791 - DNA, 20 bp, Artificial Sequence
  Synthetic: descartes_2704_HLA-DRB5
ccatgtaggaacctccaggg

SEQ ID NO: 6792 - DNA, 20 bp, Artificial Sequence
  Synthetic: descartes_2705_HLA-DRB5
ttgcagcaggataagtatga

SEQ ID NO: 6793 - DNA, 20 bp, Artificial Sequence
  Synthetic: descartes_2706_HLA-DRB5
cagcatcaccagggtctgga

SEQ ID NO: 6794 - DNA, 20 bp, Artificial Sequence
  Synthetic: descartes_2707_HLA-DRB5
tgattcttgaagtagatgaa

SEQ ID NO: 6795 - DNA, 20 bp, Artificial Sequence
  Synthetic: descartes_2708_HLA-DRB5
tgctgggcctgctcttcctt

SEQ ID NO: 6796 - DNA, 20 bp, Artificial Sequence
  Synthetic: descartes_2709_HLA-DRB5
ttcaacgggacggagcgggt

SEQ ID NO: 6797 - DNA, 20 bp, Artificial Sequence
  Synthetic: descartes_2710_HLA-E
cgagtgaatctgcggacgct

SEQ ID NO: 6798 - DNA, 20 bp, Artificial Sequence
  Synthetic: descartes_2711_HLA-E
tggagccactccacgcatgt

SEQ ID NO: 6799 - DNA, 20 bp, Artificial Sequence
  Synthetic: descartes_2712_HLA-E
ctcctctcggaggccctggc

SEQ ID NO: 6800 - DNA, 20 bp, Artificial Sequence
  Synthetic: descartes_2713_HLA-E
ctcggagatctgagccgccg

SEQ ID NO: 6801 - DNA, 20 bp, Artificial Sequence
  Synthetic: descartes_2714_HLA-E
cacacttccgtgtcccggcc

SEQ ID NO: 6802 - DNA, 20 bp, Artificial Sequence
  Synthetic: descartes_2715_HLA-E
acttttgctcggagatctga

SEQ ID NO: 6803 - DNA, 20 bp, Artificial Sequence
  Synthetic: descartes_2716_HLA-F
ggaggggcaggagcttcctt

SEQ ID NO: 6804 - DNA, 20 bp, Artificial Sequence
  Synthetic: descartes_2717_HLA-F
ataagatggtgccaagaacg

SEQ ID NO: 6805 - DNA, 20 bp, Artificial Sequence
  Synthetic: descartes_2718_HLA-F
ggctgcctccggagtcacag

SEQ ID NO: 6806 - DNA, 20 bp, Artificial Sequence
  Synthetic: descartes_2719_HLA-F
tcctgggggtgctcttccaa

SEQ ID NO: 6807 - DNA, 20 bp, Artificial Sequence
  Synthetic: descartes_2720_HLA-F
caaggccaagaaggcagtgt

SEQ ID NO: 6808 - DNA, 20 bp, Artificial Sequence
  Synthetic: descartes_2721_HLA-F
tggctgtggacatctttcaa

SEQ ID NO: 6809 - DNA, 20 bp, Artificial Sequence
  Synthetic: descartes_2722_HLA-F
gcttcggctttaggaggggc

SEQ ID NO: 6810 - DNA, 20 bp, Artificial Sequence
  Synthetic: descartes_2723_HLA-F
agcaccgctgtgtcgcggcc

SEQ ID NO: 6811 - DNA, 20 bp, Artificial Sequence
  Synthetic: descartes_2724_HLA-G
tccacagcacagcagcgacc

SEQ ID NO: 6812 - DNA, 20 bp, Artificial Sequence
  Synthetic: descartes_2725_HLA-G
agcgccgccgtgtcccggcc

SEQ ID NO: 6813 - DNA, 20 bp, Artificial Sequence
  Synthetic: descartes_2726_HLA-G
actatgaggccaccctgagg

SEQ ID NO: 6814 - DNA, 20 bp, Artificial Sequence
  Synthetic: descartes_2727_HLA-G
ttcagccacattggccgcct

SEQ ID NO: 6815 - DNA, 20 bp, Artificial Sequence
  Synthetic: descartes_2728_HLX
ggtcaaattctgcagataaa

SEQ ID NO: 6816 - DNA, 20 bp, Artificial Sequence
  Synthetic: descartes_2729_HLX
gtgcagagaacgctcactcc

SEQ ID NO: 6817 - DNA, 20 bp, Artificial Sequence
  Synthetic: descartes_2730_HLX
agattcagaagtacgtgacc

SEQ ID NO: 6818 - DNA, 20 bp, Artificial Sequence
  Synthetic: descartes_2731_HLX
acccaaaagtcaaagaaggc

SEQ ID NO: 6819 - DNA, 20 bp, Artificial Sequence
  Synthetic: descartes_2732_HLX
agggactcaggattgcagaa

SEQ ID NO: 6820 - DNA, 20 bp, Artificial Sequence
  Synthetic: descartes_2733_HLX
tctgcagaatttgacccaaa

SEQ ID NO: 6821 - DNA, 20 bp, Artificial Sequence
  Synthetic: descartes_2734_HLX
ggtccggcttggtcacgtac

SEQ ID NO: 6822 - DNA, 20 bp, Artificial Sequence
  Synthetic: descartes_2735_HLX
ctctgcaggttggagaacac

SEQ ID NO: 6823 - DNA, 20 bp, Artificial Sequence
  Synthetic: descartes_2736_HMGB1
ggcgatactcagagcagaag

SEQ ID NO: 6824 - DNA, 20 bp, Artificial Sequence
  Synthetic: descartes_2737_HMGB1
taagaagtgctcagagaggt

SEQ ID NO: 6825 - DNA, 20 bp, Artificial Sequence
  Synthetic: descartes_2738_HMGB1
ttcgcaacatcaccaatgga

SEQ ID NO: 6826 - DNA, 20 bp, Artificial Sequence
  Synthetic: descartes_2739_HMGB1
aagatatggcaaaagcggac

SEQ ID NO: 6827 - DNA, 20 bp, Artificial Sequence
  Synthetic: descartes_2740_HMGB1
cttcagcttcgcagccttct

SEQ ID NO: 6828 - DNA, 20 bp, Artificial Sequence
  Synthetic: descartes_2741_HMGB1
ctttagctcgatatgcagca

SEQ ID NO: 6829 - DNA, 20 bp, Artificial Sequence
  Synthetic: descartes_2742_HMGB1
ggagggatataggttttcat

SEQ ID NO: 6830 - DNA, 20 bp, Artificial Sequence
  Synthetic: descartes_2743_HMGB1
agccttgacaactccctttt

SEQ ID NO: 6831 - DNA, 20 bp, Artificial Sequence
  Synthetic: descartes_2744_HORMAD1
agtatcctgtatcacgtatt

SEQ ID NO: 6832 - DNA, 20 bp, Artificial Sequence
  Synthetic: descartes_2745_HORMAD1
gtgatagtatagttgagtca

SEQ ID NO: 6833 - DNA, 20 bp, Artificial Sequence
  Synthetic: descartes_2746_HORMAD1
gtgaaccaaaggaacatata

SEQ ID NO: 6834 - DNA, 20 bp, Artificial Sequence
  Synthetic: descartes_2747_HORMAD1
aatgtgggagaagtctcaac

SEQ ID NO: 6835 - DNA, 20 bp, Artificial Sequence
  Synthetic: descartes_2748_HORMAD1
atggtcaaacaaacatcatt

SEQ ID NO: 6836 - DNA, 20 bp, Artificial Sequence
  Synthetic: descartes_2749_HORMAD1
tgtaaagcatcataacatcc

SEQ ID NO: 6837 - DNA, 20 bp, Artificial Sequence
  Synthetic: descartes_2750_HORMAD1
aatacataggttccccttca

SEQ ID NO: 6838 - DNA, 20 bp, Artificial Sequence
  Synthetic: descartes_2751_HORMAD1
gcactgactcttgactagaa

SEQ ID NO: 6839 - DNA, 20 bp, Artificial Sequence
  Synthetic: descartes_2752_HPX
ctgggaagaaaaactctatc

SEQ ID NO: 6840 - DNA, 20 bp, Artificial Sequence
  Synthetic: descartes_2753_HPX
tccacatcactgtagcagta

SEQ ID NO: 6841 - DNA, 20 bp, Artificial Sequence
  Synthetic: descartes_2754_HPX
ctggaatcccatccccactg

SEQ ID NO: 6842 - DNA, 20 bp, Artificial Sequence
  Synthetic: descartes_2755_HPX
cccagccctgtggatgctgc

SEQ ID NO: 6843 - DNA, 20 bp, Artificial Sequence
  Synthetic: descartes_2756_HPX
aggagggtatacccagactt

SEQ ID NO: 6844 - DNA, 20 bp, Artificial Sequence
  Synthetic: descartes_2757_HPX
tgtggaagagtcacaaatgg

SEQ ID NO: 6845 - DNA, 20 bp, Artificial Sequence
  Synthetic: descartes_2758_HPX
atgctaccaccctggatgac

SEQ ID NO: 6846 - DNA, 20 bp, Artificial Sequence
  Synthetic: descartes_2759_HPX
catacacaaggctccgtcta

SEQ ID NO: 6847 - DNA, 20 bp, Artificial Sequence
  Synthetic: descartes_2760_HRG
tgtagcgctcagtatcctca

SEQ ID NO: 6848 - DNA, 20 bp, Artificial Sequence
  Synthetic: descartes_2761_HRG
ccagcttcccattgccgcac

SEQ ID NO: 6849 - DNA, 20 bp, Artificial Sequence
  Synthetic: descartes_2762_HRG
gaaatgtatgtgtaaaaaac

SEQ ID NO: 6850 - DNA, 20 bp, Artificial Sequence
  Synthetic: descartes_2763_HRG
ctggataggaccgaacagtc

SEQ ID NO: 6851 - DNA, 20 bp, Artificial Sequence
  Synthetic: descartes_2764_HRG
agagtggaccgaatcgagag

SEQ ID NO: 6852 - DNA, 20 bp, Artificial Sequence
  Synthetic: descartes_2765_HRG
cctgggcctcgccttcttaa

SEQ ID NO: 6853 - DNA, 20 bp, Artificial Sequence
  Synthetic: descartes_2766_HRG
agatggacgtctggaatcag

SEQ ID NO: 6854 - DNA, 20 bp, Artificial Sequence
  Synthetic: descartes_2767_HRG
gcacaaatggggcccaaaga

SEQ ID NO: 6855 - DNA, 20 bp, Artificial Sequence
  Synthetic: descartes_2768_HSPD1
agttcagcaattacagcatc

SEQ ID NO: 6856 - DNA, 20 bp, Artificial Sequence
  Synthetic: descartes_2769_HSPD1
gactgctttttaagttcagc

SEQ ID NO: 6857 - DNA, 20 bp, Artificial Sequence
  Synthetic: descartes_2770_HSPD1
ttcaggggtggtcacaggtt

SEQ ID NO: 6858 - DNA, 20 bp, Artificial Sequence
  Synthetic: descartes_2771_HSPD1
cataattttctcaactatca

SEQ ID NO: 6859 - DNA, 20 bp, Artificial Sequence
  Synthetic: descartes_2772_HSPD1
tatttatcttttaagtcaat

SEQ ID NO: 6860 - DNA, 20 bp, Artificial Sequence
  Synthetic: descartes_2773_HSPD1
tagtatccagtccattgtac

SEQ ID NO: 6861 - DNA, 20 bp, Artificial Sequence
  Synthetic: descartes_2774_HSPD1
gtgacaatagaaagaaccag

SEQ ID NO: 6862 - DNA, 20 bp, Artificial Sequence
  Synthetic: descartes_2775_HSPD1
gccgatgctgtggccgttac

SEQ ID NO: 6863 - DNA, 20 bp, Artificial Sequence
  Synthetic: descartes_2776_ICAM1
ccggacaatccctctcgtcc

SEQ ID NO: 6864 - DNA, 20 bp, Artificial Sequence
  Synthetic: descartes_2777_ICAM1
gctgttgactgcccatcagg

SEQ ID NO: 6865 - DNA, 20 bp, Artificial Sequence
  Synthetic: descartes_2778_ICAM1
agaacacctcggccccctac

SEQ ID NO: 6866 - DNA, 20 bp, Artificial Sequence
  Synthetic: descartes_2779_ICAM1
ccactgcccatcggggaatc

SEQ ID NO: 6867 - DNA, 20 bp, Artificial Sequence
  Synthetic: descartes_2780_ICAM1
agggggacacagatgtctgg

SEQ ID NO: 6868 - DNA, 20 bp, Artificial Sequence
  Synthetic: descartes_2781_ICAM1
ggcaacggggtctctatgcc

SEQ ID NO: 6869 - DNA, 20 bp, Artificial Sequence
  Synthetic: descartes_2782_ICAM1
ggcctgttgtagtctgtatt

SEQ ID NO: 6870 - DNA, 20 bp, Artificial Sequence
  Synthetic: descartes_2783_ICAM1
tggccacgtccagtttcccg

SEQ ID NO: 6871 - DNA, 20 bp, Artificial Sequence
  Synthetic: descartes_2784_ICOS
gctgtgttcactgctctcat

SEQ ID NO: 6872 - DNA, 20 bp, Artificial Sequence
  Synthetic: descartes_2785_ICOS
aagtaactcttacaggagga

SEQ ID NO: 6873 - DNA, 20 bp, Artificial Sequence
  Synthetic: descartes_2786_ICOS
aaaggaggaggatcaaaaat

SEQ ID NO: 6874 - DNA, 20 bp, Artificial Sequence
  Synthetic: descartes_2787_ICOS
tatacaacttggaccattct

SEQ ID NO: 6875 - DNA, 20 bp, Artificial Sequence
  Synthetic: descartes_2788_ICOS
acaacggaggtgtacaaatt

SEQ ID NO: 6876 - DNA, 20 bp, Artificial Sequence
  Synthetic: descartes_2789_ICOS
atgcgcaagcagaagagaaa

SEQ ID NO: 6877 - DNA, 20 bp, Artificial Sequence
  Synthetic: descartes_2790_ICOS
taagccaacaaataagtatg

SEQ ID NO: 6878 - DNA, 20 bp, Artificial Sequence
  Synthetic: descartes_2791_ICOS
aattgctggacaatgtcagg

SEQ ID NO: 6879 - DNA, 20 bp, Artificial Sequence
  Synthetic: descartes_2792_ICOSLG
gactcactggtttgccaata

SEQ ID NO: 6880 - DNA, 20 bp, Artificial Sequence
  Synthetic: descartes_2793_ICOSLG
ccaatatacgtaaacatcat

SEQ ID NO: 6881 - DNA, 20 bp, Artificial Sequence
  Synthetic: descartes_2794_ICOSLG
caaggagctgttctgtggga

SEQ ID NO: 6882 - DNA, 20 bp, Artificial Sequence
  Synthetic: descartes_2795_ICOSLG
actgcctggtgttgagccaa

SEQ ID NO: 6883 - DNA, 20 bp, Artificial Sequence
  Synthetic: descartes_2796_ICOSLG
agcgttgaggttacactgca

SEQ ID NO: 6884 - DNA, 20 bp, Artificial Sequence
  Synthetic: descartes_2797_ICOSLG
cgtatattggcaaaccagtg

SEQ ID NO: 6885 - DNA, 20 bp, Artificial Sequence
  Synthetic: descartes_2798_ICOSLG
tcgccggtactgactggatt

SEQ ID NO: 6886 - DNA, 20 bp, Artificial Sequence
  Synthetic: descartes_2799_ICOSLG
tggatgtacacgtgaaggtg

SEQ ID NO: 6887 - DNA, 20 bp, Artificial Sequence
  Synthetic: descartes_2800_IDO1
gtgatggagactgcagtaaa

SEQ ID NO: 6888 - DNA, 20 bp, Artificial Sequence
  Synthetic: descartes_2801_IDO1
ctgaagactgtaagaagtac

SEQ ID NO: 6889 - DNA, 20 bp, Artificial Sequence
  Synthetic: descartes_2802_IDO1
ccaagacacagtctgcataa

SEQ ID NO: 6890 - DNA, 20 bp, Artificial Sequence
  Synthetic: descartes_2803_IDO1
gcaatgaacatccagtcatt

SEQ ID NO: 6891 - DNA, 20 bp, Artificial Sequence
  Synthetic: descartes_2804_IDO1
cagggggcagtgcaggccaa

SEQ ID NO: 6892 - DNA, 20 bp, Artificial Sequence
  Synthetic: descartes_2805_IDO1
gtttatgcagactgtgtctt

SEQ ID NO: 6893 - DNA, 20 bp, Artificial Sequence
  Synthetic: descartes_2806_IDO1
ggtcttcccagaacccttca

SEQ ID NO: 6894 - DNA, 20 bp, Artificial Sequence
  Synthetic: descartes_2807_IDO1
aagggtcttcagaggtctta

SEQ ID NO: 6895 - DNA, 20 bp, Artificial Sequence
  Synthetic: descartes_2808_IFNA1
tcccaccctctcctcctgca

SEQ ID NO: 6896 - DNA, 20 bp, Artificial Sequence
  Synthetic: descartes_2809_IFNA1
atggcaaccagttccagaag

SEQ ID NO: 6897 - DNA, 20 bp, Artificial Sequence
  Synthetic: descartes_2810_IFNA1
cccaggaggagtttgatggc

SEQ ID NO: 6898 - DNA, 20 bp, Artificial Sequence
  Synthetic: descartes_2811_IFNA1
tctaggaggtcctcatccca

SEQ ID NO: 6899 - DNA, 20 bp, Artificial Sequence
  Synthetic: descartes_2812_IFNA1
tgctctgacaacctcccagg

SEQ ID NO: 6900 - DNA, 20 bp, Artificial Sequence
  Synthetic: descartes_2813_IFNA1
ctgatggtcctggtggtgct

SEQ ID NO: 6901 - DNA, 20 bp, Artificial Sequence
  Synthetic: descartes_2814_IFNA1
ttgataaagagagggatctc

SEQ ID NO: 6902 - DNA, 20 bp, Artificial Sequence
  Synthetic: descartes_2815_IFNA1
ccacaaaagattcatctgct

SEQ ID NO: 6903 - DNA, 20 bp, Artificial Sequence
  Synthetic: descartes_2816_IFNA10
cactgaactttaccagcaac

SEQ ID NO: 6904 - DNA, 20 bp, Artificial Sequence
  Synthetic: descartes_2817_IFNA10
ctcacagccaggatggagtc

SEQ ID NO: 6905 - DNA, 20 bp, Artificial Sequence
  Synthetic: descartes_2818_IFNA10
cgaatcccccaggaggagtt

SEQ ID NO: 6906 - DNA, 20 bp, Artificial Sequence
  Synthetic: descartes_2819_IFNA10
atggcaaccagttccagaag

SEQ ID NO: 6907 - DNA, 20 bp, Artificial Sequence
  Synthetic: descartes_2820_IFNA10
ccagcaactgaatgacctgg

SEQ ID NO: 6908 - DNA, 20 bp, Artificial Sequence
  Synthetic: descartes_2821_IFNA10
taggaggctctgttcccaag

SEQ ID NO: 6909 - DNA, 20 bp, Artificial Sequence
  Synthetic: descartes_2822_IFNA10
tgctctgacaacctcccagg

SEQ ID NO: 6910 - DNA, 20 bp, Artificial Sequence
  Synthetic: descartes_2823_IFNA10
aacaaacttgcaaaaaagat

SEQ ID NO: 6911 - DNA, 20 bp, Artificial Sequence
  Synthetic: descartes_2824_IFNA14
atggcaaccagttccagaaa

SEQ ID NO: 6912 - DNA, 20 bp, Artificial Sequence
  Synthetic: descartes_2825_IFNA14
taggagggtctcatcccaag

SEQ ID NO: 6913 - DNA, 20 bp, Artificial Sequence
  Synthetic: descartes_2826_IFNA14
agacagattacagcccagag

SEQ ID NO: 6914 - DNA, 20 bp, Artificial Sequence
  Synthetic: descartes_2827_IFNA14
ctggaaaagttcaatgtaga

SEQ ID NO: 6915 - DNA, 20 bp, Artificial Sequence
  Synthetic: descartes_2828_IFNA14
tgctctgacaacctcccagg

SEQ ID NO: 6916 - DNA, 20 bp, Artificial Sequence
  Synthetic: descartes_2829_IFNA14
atgatggccctggtggtgct

SEQ ID NO: 6917 - DNA, 20 bp, Artificial Sequence
  Synthetic: descartes_2830_IFNA14
cccaggaggaatttgatggc

SEQ ID NO: 6918 - DNA, 20 bp, Artificial Sequence
  Synthetic: descartes_2831_IFNA14
tctgatggagaagaaataca

SEQ ID NO: 6919 - DNA, 20 bp, Artificial Sequence
  Synthetic: descartes_2832_IFNA16
ggattcccccaggaggtgtt

SEQ ID NO: 6920 - DNA, 20 bp, Artificial Sequence
  Synthetic: descartes_2833_IFNA16
tctaggagggtctcatccca

SEQ ID NO: 6921 - DNA, 20 bp, Artificial Sequence
  Synthetic: descartes_2834_IFNA16
ctcacagccaggatggagtc

SEQ ID NO: 6922 - DNA, 20 bp, Artificial Sequence
  Synthetic: descartes_2835_IFNA16
atggcaaccagttccagaag

SEQ ID NO: 6923 - DNA, 20 bp, Artificial Sequence
  Synthetic: descartes_2836_IFNA16
cagcaactgaatgacctaga

SEQ ID NO: 6924 - DNA, 20 bp, Artificial Sequence
  Synthetic: descartes_2837_IFNA16
tcctgcctgaaggacagata

SEQ ID NO: 6925 - DNA, 20 bp, Artificial Sequence
  Synthetic: descartes_2838_IFNA16
tgctctgacaacctcccagg

SEQ ID NO: 6926 - DNA, 20 bp, Artificial Sequence
  Synthetic: descartes_2839_IFNA16
ttgaaaaagagaaggatctc

SEQ ID NO: 6927 - DNA, 20 bp, Artificial Sequence
  Synthetic: descartes_2840_IFNA17
atggcaaccagttccagaag

SEQ ID NO: 6928 - DNA, 20 bp, Artificial Sequence
  Synthetic: descartes_2841_IFNA17
cactgaactttaccagcaac

SEQ ID NO: 6929 - DNA, 20 bp, Artificial Sequence
  Synthetic: descartes_2842_IFNA17
ccagcaactgaataacctgg

SEQ ID NO: 6930 - DNA, 20 bp, Artificial Sequence
  Synthetic: descartes_2843_IFNA17
ctcacagccaggatggagtc

SEQ ID NO: 6931 - DNA, 20 bp, Artificial Sequence
  Synthetic: descartes_2844_IFNA17
taggaggctctgttcccaag

SEQ ID NO: 6932 - DNA, 20 bp, Artificial Sequence
  Synthetic: descartes_2845_IFNA17
tgctctgacaacctcccagg

SEQ ID NO: 6933 - DNA, 20 bp, Artificial Sequence
  Synthetic: descartes_2846_IFNA17
ttgaaaaagagagagatctc

SEQ ID NO: 6934 - DNA, 20 bp, Artificial Sequence
  Synthetic: descartes_2847_IFNA17
aacaaacttgcaaaaaatat

SEQ ID NO: 6935 - DNA, 20 bp, Artificial Sequence
  Synthetic: descartes_2848_IFNA2
ctcacagccagaatggagtc

SEQ ID NO: 6936 - DNA, 20 bp, Artificial Sequence
  Synthetic: descartes_2849_IFNA2
tctaggagggtctcatccca

SEQ ID NO: 6937 - DNA, 20 bp, Artificial Sequence
  Synthetic: descartes_2850_IFNA2
cccaggaggagtttggcaac

SEQ ID NO: 6938 - DNA, 20 bp, Artificial Sequence
  Synthetic: descartes_2851_IFNA2
ctggtggccctcctggtgct

SEQ ID NO: 6939 - DNA, 20 bp, Artificial Sequence
  Synthetic: descartes_2852_IFNA2
ttgacaaagaaaaagatctc

SEQ ID NO: 6940 - DNA, 20 bp, Artificial Sequence
  Synthetic: descartes_2853_IFNA2
tgctctgacaacctcccagg

SEQ ID NO: 6941 - DNA, 20 bp, Artificial Sequence
  Synthetic: descartes_2854_IFNA2
aggcagatcacagcccacag

SEQ ID NO: 6942 - DNA, 20 bp, Artificial Sequence
  Synthetic: descartes_2855_IFNA2
gcaaccagttccaaaaggct

SEQ ID NO: 6943 - DNA, 20 bp, Artificial Sequence
  Synthetic: descartes_2856_IFNA21
cactgaacttaaccagcagc

SEQ ID NO: 6944 - DNA, 20 bp, Artificial Sequence
  Synthetic: descartes_2857_IFNA21
atggcaaccagttccagaag

SEQ ID NO: 6945 - DNA, 20 bp, Artificial Sequence
  Synthetic: descartes_2858_IFNA21
taggaggctctgttcccaag

SEQ ID NO: 6946 - DNA, 20 bp, Artificial Sequence
  Synthetic: descartes_2859_IFNA21
tctgacagagaagaaataca

SEQ ID NO: 6947 - DNA, 20 bp, Artificial Sequence
  Synthetic: descartes_2860_IFNA21
tgctctgacaacctcccagg

SEQ ID NO: 6948 - DNA, 20 bp, Artificial Sequence
  Synthetic: descartes_2861_IFNA21
gattcccccaggaggagttt

SEQ ID NO: 6949 - DNA, 20 bp, Artificial Sequence
  Synthetic: descartes_2862_IFNA21
ataaagagaaggatctcatg

SEQ ID NO: 6950 - DNA, 20 bp, Artificial Sequence
  Synthetic: descartes_2863_IFNA21
ttcacagccaggatggagtc

SEQ ID NO: 6951 - DNA, 20 bp, Artificial Sequence
  Synthetic: descartes_2864_IFNA4
ggattccccgaggaggagtt

SEQ ID NO: 6952 - DNA, 20 bp, Artificial Sequence
  Synthetic: descartes_2865_IFNA4
cactgaactttaccagcaac

SEQ ID NO: 6953 - DNA, 20 bp, Artificial Sequence
  Synthetic: descartes_2866_IFNA4
ctcacagccaggatggagtc

SEQ ID NO: 6954 - DNA, 20 bp, Artificial Sequence
  Synthetic: descartes_2867_IFNA4
ccagcaactgaatgacctgg

SEQ ID NO: 6955 - DNA, 20 bp, Artificial Sequence
  Synthetic: descartes_2868_IFNA4
taggaggctctgttcccaag

SEQ ID NO: 6956 - DNA, 20 bp, Artificial Sequence
  Synthetic: descartes_2869_IFNA4
atggccaccagttccagaag

SEQ ID NO: 6957 - DNA, 20 bp, Artificial Sequence
  Synthetic: descartes_2870_IFNA4
tgctctgacaacctcccagg

SEQ ID NO: 6958 - DNA, 20 bp, Artificial Sequence
  Synthetic: descartes_2871_IFNA4
tcctgcctgaaggacagaca

SEQ ID NO: 6959 - DNA, 20 bp, Artificial Sequence
  Synthetic: descartes_2872_IFNA5
ctgataaagagaaggatctc

SEQ ID NO: 6960 - DNA, 20 bp, Artificial Sequence
  Synthetic: descartes_2873_IFNA5
tctagaagtgtctcatccca

SEQ ID NO: 6961 - DNA, 20 bp, Artificial Sequence
  Synthetic: descartes_2874_IFNA5
atggcaaccagttccagaag

SEQ ID NO: 6962 - DNA, 20 bp, Artificial Sequence
  Synthetic: descartes_2875_IFNA5
ctgatggccctggtggtgct

SEQ ID NO: 6963 - DNA, 20 bp, Artificial Sequence
  Synthetic: descartes_2876_IFNA5
ccagcagctgaatgacctgg

SEQ ID NO: 6964 - DNA, 20 bp, Artificial Sequence
  Synthetic: descartes_2877_IFNA5
tcacagtcaggatagagtcc

SEQ ID NO: 6965 - DNA, 20 bp, Artificial Sequence
  Synthetic: descartes_2878_IFNA5
tgctctgacaacctcccatg

SEQ ID NO: 6966 - DNA, 20 bp, Artificial Sequence
  Synthetic: descartes_2879_IFNA5
aaagaatcaccctctatctg

SEQ ID NO: 6967 - DNA, 20 bp, Artificial Sequence
  Synthetic: descartes_2880_IFNA6
tctagaagcctctcatccca

SEQ ID NO: 6968 - DNA, 20 bp, Artificial Sequence
  Synthetic: descartes_2881_IFNA6
tctgtcaggtagagagtgat

SEQ ID NO: 6969 - DNA, 20 bp, Artificial Sequence
  Synthetic: descartes_2882_IFNA6
cccaggaggagtttgatggc

SEQ ID NO: 6970 - DNA, 20 bp, Artificial Sequence
  Synthetic: descartes_2883_IFNA6
ccagcagctgaatgacctgg

SEQ ID NO: 6971 - DNA, 20 bp, Artificial Sequence
  Synthetic: descartes_2884_IFNA6
atggcaaccagttccagaag

SEQ ID NO: 6972 - DNA, 20 bp, Artificial Sequence
  Synthetic: descartes_2885_IFNA6
ttgatgaagagaaggatctc

SEQ ID NO: 6973 - DNA, 20 bp, Artificial Sequence
  Synthetic: descartes_2886_IFNA6
tcctgtctgaaggacagaca

SEQ ID NO: 6974 - DNA, 20 bp, Artificial Sequence
  Synthetic: descartes_2887_IFNA6
ctgatggccctggtggtgct

SEQ ID NO: 6975 - DNA, 20 bp, Artificial Sequence
  Synthetic: descartes_2888_IFNA7
cactgaactttaccagcaac

SEQ ID NO: 6976 - DNA, 20 bp, Artificial Sequence
  Synthetic: descartes_2889_IFNA7
ctcacagccaggatgaagtc

SEQ ID NO: 6977 - DNA, 20 bp, Artificial Sequence
  Synthetic: descartes_2890_IFNA7
atggccaccagttccagaag

SEQ ID NO: 6978 - DNA, 20 bp, Artificial Sequence
  Synthetic: descartes_2891_IFNA7
ccagcaactgaatgacctgg

SEQ ID NO: 6979 - DNA, 20 bp, Artificial Sequence
  Synthetic: descartes_2892_IFNA7
taggaggctctgttcccaag

SEQ ID NO: 6980 - DNA, 20 bp, Artificial Sequence
  Synthetic: descartes_2893_IFNA7
tgctctgacaacctcccagg

SEQ ID NO: 6981 - DNA, 20 bp, Artificial Sequence
  Synthetic: descartes_2894_IFNA7
ttgaaaaagagaaggatctc

SEQ ID NO: 6982 - DNA, 20 bp, Artificial Sequence
  Synthetic: descartes_2895_IFNA7
tagctgagtaccagcacgac

SEQ ID NO: 6983 - DNA, 20 bp, Artificial Sequence
  Synthetic: descartes_2896_IFNA8
gatgagacccttctagatga

SEQ ID NO: 6984 - DNA, 20 bp, Artificial Sequence
  Synthetic: descartes_2897_IFNA8
ctcacagccaggatggagtc

SEQ ID NO: 6985 - DNA, 20 bp, Artificial Sequence
  Synthetic: descartes_2898_IFNA8
ctggtggccctagtggtgct

SEQ ID NO: 6986 - DNA, 20 bp, Artificial Sequence
  Synthetic: descartes_2899_IFNA8
atgataaacagttccagaag

SEQ ID NO: 6987 - DNA, 20 bp, Artificial Sequence
  Synthetic: descartes_2900_IFNA8
tgctctgacaacctcccagg

SEQ ID NO: 6988 - DNA, 20 bp, Artificial Sequence
  Synthetic: descartes_2901_IFNA8
tcctgcctgaaggacagaca

SEQ ID NO: 6989 - DNA, 20 bp, Artificial Sequence
  Synthetic: descartes_2902_IFNA8
tgccaggagtatcaaggccc

SEQ ID NO: 6990 - DNA, 20 bp, Artificial Sequence
  Synthetic: descartes_2903_IFNA8
ttctctgtcagatatagagt

SEQ ID NO: 6991 - DNA, 20 bp, Artificial Sequence
  Synthetic: descartes_2904_IFNB1
ggaggtaacctgtaagtctg

SEQ ID NO: 6992 - DNA, 20 bp, Artificial Sequence
  Synthetic: descartes_2905_IFNB1
tctgatgatagacattagcc

SEQ ID NO: 6993 - DNA, 20 bp, Artificial Sequence
  Synthetic: descartes_2906_IFNB1
agacaagattcatctagcac

SEQ ID NO: 6994 - DNA, 20 bp, Artificial Sequence
  Synthetic: descartes_2907_IFNB1
accaggggaaaactcatgag

SEQ ID NO: 6995 - DNA, 20 bp, Artificial Sequence
  Synthetic: descartes_2908_IFNB1
agtgtcagaagctcctgtgg

SEQ ID NO: 6996 - DNA, 20 bp, Artificial Sequence
  Synthetic: descartes_2909_IFNB1
aggtgcagactgctcatgag

SEQ ID NO: 6997 - DNA, 20 bp, Artificial Sequence
  Synthetic: descartes_2910_IFNB1
ccctggtgaaatcttctttc

SEQ ID NO: 6998 - DNA, 20 bp, Artificial Sequence
  Synthetic: descartes_2911_IFNB1
ttccaggactgtcttcagat

SEQ ID NO: 6999 - DNA, 20 bp, Artificial Sequence
  Synthetic: descartes_2912_IFNE
ctcccaaccatccagagaaa

SEQ ID NO: 7000 - DNA, 20 bp, Artificial Sequence
  Synthetic: descartes_2913_IFNE
tgtgagactgaacacaaaga

SEQ ID NO: 7001 - DNA, 20 bp, Artificial Sequence
  Synthetic: descartes_2914_IFNE
acttgtaatctaaggttatc

SEQ ID NO: 7002 - DNA, 20 bp, Artificial Sequence
  Synthetic: descartes_2915_IFNE
ctgtgtggtagacactgctg

SEQ ID NO: 7003 - DNA, 20 bp, Artificial Sequence
  Synthetic: descartes_2916_IFNE
gtactgctgaggactcaaag

SEQ ID NO: 7004 - DNA, 20 bp, Artificial Sequence
  Synthetic: descartes_2917_IFNE
aaatctagagagaagatagt

SEQ ID NO: 7005 - DNA, 20 bp, Artificial Sequence
  Synthetic: descartes_2918_IFNE
ccctgaagaggctgaagatc

SEQ ID NO: 7006 - DNA, 20 bp, Artificial Sequence
  Synthetic: descartes_2919_IFNE
caggtaatcatggatccttc

SEQ ID NO: 7007 - DNA, 20 bp, Artificial Sequence
  Synthetic: descartes_2920_IFNG
gctgctggcgacagttcagc

SEQ ID NO: 7008 - DNA, 20 bp, Artificial Sequence
  Synthetic: descartes_2921_IFNG
aagatgaccagagcatccaa

SEQ ID NO: 7009 - DNA, 20 bp, Artificial Sequence
  Synthetic: descartes_2922_IFNG
aatagcaacaaaaagaaacg

SEQ ID NO: 7010 - DNA, 20 bp, Artificial Sequence
  Synthetic: descartes_2923_IFNG
gaggtcgaagagcatcccag

SEQ ID NO: 7011 - DNA, 20 bp, Artificial Sequence
  Synthetic: descartes_2924_IFNG
catatgggtcctggcagtaa

SEQ ID NO: 7012 - DNA, 20 bp, Artificial Sequence
  Synthetic: descartes_2925_IFNG
gatgctctggtcatctttaa

SEQ ID NO: 7013 - DNA, 20 bp, Artificial Sequence
  Synthetic: descartes_2926_IFNG
cgttggacattcaagtcagt

SEQ ID NO: 7014 - DNA, 20 bp, Artificial Sequence
  Synthetic: descartes_2927_IFNG
ggttctcttggctgttactg

SEQ ID NO: 7015 - DNA, 20 bp, Artificial Sequence
  Synthetic: descartes_2928_IFNK
ctgtagaatgtctacgagaa

SEQ ID NO: 7016 - DNA, 20 bp, Artificial Sequence
  Synthetic: descartes_2929_IFNK
ctgaaagaaaagaaatacag

SEQ ID NO: 7017 - DNA, 20 bp, Artificial Sequence
  Synthetic: descartes_2930_IFNK
ccaggtgactcttctcaggt

SEQ ID NO: 7018 - DNA, 20 bp, Artificial Sequence
  Synthetic: descartes_2931_IFNK
atagaaggccttcttgatgt

SEQ ID NO: 7019 - DNA, 20 bp, Artificial Sequence
  Synthetic: descartes_2932_IFNK
tgcaatacacccaacctatg

SEQ ID NO: 7020 - DNA, 20 bp, Artificial Sequence
  Synthetic: descartes_2933_IFNK
tcgtagacattctacaggaa

SEQ ID NO: 7021 - DNA, 20 bp, Artificial Sequence
  Synthetic: descartes_2934_IFNK
ctcctgaatagagctgtaaa

SEQ ID NO: 7022 - DNA, 20 bp, Artificial Sequence
  Synthetic: descartes_2935_IFNK
attcttgtcttcctccaagc

SEQ ID NO: 7023 - DNA, 20 bp, Artificial Sequence
  Synthetic: descartes_2936_IFNL1
aacctgccaatgtggcagcc

SEQ ID NO: 7024 - DNA, 20 bp, Artificial Sequence
  Synthetic: descartes_2937_IFNL1
gtgctaggcttggccgtggc

SEQ ID NO: 7025 - DNA, 20 bp, Artificial Sequence
  Synthetic: descartes_2938_IFNL1
ggggcctcctggagccggtg

SEQ ID NO: 7026 - DNA, 20 bp, Artificial Sequence
  Synthetic: descartes_2939_IFNL1
aggtctcgcgtgaggaggcg

SEQ ID NO: 7027 - DNA, 20 bp, Artificial Sequence
  Synthetic: descartes_2940_IFNW1
gtgcagaagcaccaaggtgt

SEQ ID NO: 7028 - DNA, 20 bp, Artificial Sequence
  Synthetic: descartes_2941_IFNW1
ccatctcctgggggaacctg

SEQ ID NO: 7029 - DNA, 20 bp, Artificial Sequence
  Synthetic: descartes_2942_IFNW1
atgatttccattctgacaac

SEQ ID NO: 7030 - DNA, 20 bp, Artificial Sequence
  Synthetic: descartes_2943_IFNW1
ttgataagaacaaggatttc

SEQ ID NO: 7031 - DNA, 20 bp, Artificial Sequence
  Synthetic: descartes_2944_IFNW1
cattctgacaacttcccagg

SEQ ID NO: 7032 - DNA, 20 bp, Artificial Sequence
  Synthetic: descartes_2945_IFNW1
aggtagacacggattccctg

SEQ ID NO: 7033 - DNA, 20 bp, Artificial Sequence
  Synthetic: descartes_2946_IFNW1
ttgtgtctcaaggacagaag

SEQ ID NO: 7034 - DNA, 20 bp, Artificial Sequence
  Synthetic: descartes_2947_IFNW1
ttctctttcaggtagacacg

SEQ ID NO: 7035 - DNA, 20 bp, Artificial Sequence
  Synthetic: descartes_2948_IGF1
ctgcactccctctacttgcg

SEQ ID NO: 7036 - DNA, 20 bp, Artificial Sequence
  Synthetic: descartes_2949_IGF1
cttctctgagacttcgtgtt

SEQ ID NO: 7037 - DNA, 20 bp, Artificial Sequence
  Synthetic: descartes_2950_IGF1
aagaacgcaagtagagggag

SEQ ID NO: 7038 - DNA, 20 bp, Artificial Sequence
  Synthetic: descartes_2951_IGF1
agtgctgcttttgtgatttc

SEQ ID NO: 7039 - DNA, 20 bp, Artificial Sequence
  Synthetic: descartes_2952_IGF2
cccagacccccaaattatcg

SEQ ID NO: 7040 - DNA, 20 bp, Artificial Sequence
  Synthetic: descartes_2953_IGF2
ggtgggccgcaaaggcgagc

SEQ ID NO: 7041 - DNA, 20 bp, Artificial Sequence
  Synthetic: descartes_2954_IGF2
gcctccctgaacgcctcgag

SEQ ID NO: 7042 - DNA, 20 bp, Artificial Sequence
  Synthetic: descartes_2955_IGF2
cggcccacccaaaatatctg

SEQ ID NO: 7043 - DNA, 20 bp, Artificial Sequence
  Synthetic: descartes_2956_IGF2
cgcagctgtgacctggccct

SEQ ID NO: 7044 - DNA, 20 bp, Artificial Sequence
  Synthetic: descartes_2957_IGLL1
gcagcgggacccagctcacc

SEQ ID NO: 7045 - DNA, 20 bp, Artificial Sequence
  Synthetic: descartes_2958_IGLL1
aatccaagcataactcagtg

SEQ ID NO: 7046 - DNA, 20 bp, Artificial Sequence
  Synthetic: descartes_2959_IGLL1
gagggcgtggtcatctccac

SEQ ID NO: 7047 - DNA, 20 bp, Artificial Sequence
  Synthetic: descartes_2960_IGLL1
tccgggaatcttgacggtga

SEQ ID NO: 7048 - DNA, 20 bp, Artificial Sequence
  Synthetic: descartes_2961_IGLL5
gtctgagcctcagtcactgt

SEQ ID NO: 7049 - DNA, 20 bp, Artificial Sequence
  Synthetic: descartes_2962_IGLL5
gtggtctccactcccgcctt

SEQ ID NO: 7050 - DNA, 20 bp, Artificial Sequence
  Synthetic: descartes_2963_IGLL5
gagggtttggtggtctccac

SEQ ID NO: 7051 - DNA, 20 bp, Artificial Sequence
  Synthetic: descartes_2964_IGLL5
cggtgcaaccattgggcgca

SEQ ID NO: 7052 - DNA, 20 bp, Artificial Sequence
  Synthetic: descartes_2965_IHH
actgggtgtattacgagtca

SEQ ID NO: 7053 - DNA, 20 bp, Artificial Sequence
  Synthetic: descartes_2966_IHH
ctggaccgcgagcctcacag

SEQ ID NO: 7054 - DNA, 20 bp, Artificial Sequence
  Synthetic: descartes_2967_IHH
actcgtaatacacccagtca

SEQ ID NO: 7055 - DNA, 20 bp, Artificial Sequence
  Synthetic: descartes_2968_IHH
ccagccacgtgcagcctggc

SEQ ID NO: 7056 - DNA, 20 bp, Artificial Sequence
  Synthetic: descartes_2969_IHH
acagcttggcatggggcagc

SEQ ID NO: 7057 - DNA, 20 bp, Artificial Sequence
  Synthetic: descartes_2970_IHH
cggctgacaatcacacggag

SEQ ID NO: 7058 - DNA, 20 bp, Artificial Sequence
  Synthetic: descartes_2971_IHH
cgtggcggtcgccggcggct

SEQ ID NO: 7059 - DNA, 20 bp, Artificial Sequence
  Synthetic: descartes_2972_IHH
tgagcggggcgtaggccccg

SEQ ID NO: 7060 - DNA, 20 bp, Artificial Sequence
  Synthetic: descartes_2973_IKBKB
cctccaggccagcagcagtt

SEQ ID NO: 7061 - DNA, 20 bp, Artificial Sequence
  Synthetic: descartes_2974_IKBKB
ccctaccccaataatcttaa

SEQ ID NO: 7062 - DNA, 20 bp, Artificial Sequence
  Synthetic: descartes_2975_IKBKB
ccttagtctcctgtacagct

SEQ ID NO: 7063 - DNA, 20 bp, Artificial Sequence
  Synthetic: descartes_2976_IKBKB
ctgttgtcaaagagaaaaac

SEQ ID NO: 7064 - DNA, 20 bp, Artificial Sequence
  Synthetic: descartes_2977_IKBKB
gccgccccagccccgccttc

SEQ ID NO: 7065 - DNA, 20 bp, Artificial Sequence
  Synthetic: descartes_2978_IKBKB
ccaggccccacatgtctgcg

SEQ ID NO: 7066 - DNA, 20 bp, Artificial Sequence
  Synthetic: descartes_2979_IKBKB
atgaaggtatctaagcgcag

SEQ ID NO: 7067 - DNA, 20 bp, Artificial Sequence
  Synthetic: descartes_2980_IKBKB
tagcagggtgcagaggttat

SEQ ID NO: 7068 - DNA, 20 bp, Artificial Sequence
  Synthetic: descartes_2981_IKBKG
ctggcctcctggaacttgca

SEQ ID NO: 7069 - DNA, 20 bp, Artificial Sequence
  Synthetic: descartes_2982_IKBKG
acagaggccttgtcctcagc

SEQ ID NO: 7070 - DNA, 20 bp, Artificial Sequence
  Synthetic: descartes_2983_IKBKG
ctgtactccctctgcagctg

SEQ ID NO: 7071 - DNA, 20 bp, Artificial Sequence
  Synthetic: descartes_2984_IKBKG
cccacctggatcacaagggc

SEQ ID NO: 7072 - DNA, 20 bp, Artificial Sequence
  Synthetic: descartes_2985_IKBKG
caagccagccagagggagga

SEQ ID NO: 7073 - DNA, 20 bp, Artificial Sequence
  Synthetic: descartes_2986_IKBKG
cccacctgatgggacctcga

SEQ ID NO: 7074 - DNA, 20 bp, Artificial Sequence
  Synthetic: descartes_2987_IKBKG
gccaccagggcctcctcggc

SEQ ID NO: 7075 - DNA, 20 bp, Artificial Sequence
  Synthetic: descartes_2988_IL10
cctggaggaggtgatgcccc

SEQ ID NO: 7076 - DNA, 20 bp, Artificial Sequence
  Synthetic: descartes_2989_IL10
gtatcttcattgtcatgtag

SEQ ID NO: 7077 - DNA, 20 bp, Artificial Sequence
  Synthetic: descartes_2990_IL10
acatcttcatcaactacata

SEQ ID NO: 7078 - DNA, 20 bp, Artificial Sequence
  Synthetic: descartes_2991_IL10
acaacaagttgtccagctga

SEQ ID NO: 7079 - DNA, 20 bp, Artificial Sequence
  Synthetic: descartes_2992_IL10
ttccctgtgaaaacaagagc

SEQ ID NO: 7080 - DNA, 20 bp, Artificial Sequence
  Synthetic: descartes_2993_IL12A
gccagaaacctccccgtggc

SEQ ID NO: 7081 - DNA, 20 bp, Artificial Sequence
  Synthetic: descartes_2994_IL12A
cccttgcacttctgaagaga

SEQ ID NO: 7082 - DNA, 20 bp, Artificial Sequence
  Synthetic: descartes_2995_IL12A
aacagtgagactgtgccaca

SEQ ID NO: 7083 - DNA, 20 bp, Artificial Sequence
  Synthetic: descartes_2996_IL12A
atctagaaagatctgcctct

SEQ ID NO: 7084 - DNA, 20 bp, Artificial Sequence
  Synthetic: descartes_2997_IL12A
ggagtggtgaaggcatggga

SEQ ID NO: 7085 - DNA, 20 bp, Artificial Sequence
  Synthetic: descartes_2998_IL12A
tggcacagtctcactgttga

SEQ ID NO: 7086 - DNA, 20 bp, Artificial Sequence
  Synthetic: descartes_2999_IL12A
tggccaaactgaggtggtcc

SEQ ID NO: 7087 - DNA, 20 bp, Artificial Sequence
  Synthetic: descartes_3000_IL12A
tgaagacttgaagatgtacc

SEQ ID NO: 7088 - DNA, 20 bp, Artificial Sequence
  Synthetic: descartes_3001_IL12B
ccagagcctaagacctcact

SEQ ID NO: 7089 - DNA, 20 bp, Artificial Sequence
  Synthetic: descartes_3002_IL12B
tccaggggcatccggatacc

SEQ ID NO: 7090 - DNA, 20 bp, Artificial Sequence
  Synthetic: descartes_3003_IL12B
gagatgctggccagtacacc

SEQ ID NO: 7091 - DNA, 20 bp, Artificial Sequence
  Synthetic: descartes_3004_IL12B
acactgaatgtcaaatcagt

SEQ ID NO: 7092 - DNA, 20 bp, Artificial Sequence
  Synthetic: descartes_3005_IL12B
acctgctggtggctgacgac

SEQ ID NO: 7093 - DNA, 20 bp, Artificial Sequence
  Synthetic: descartes_3006_IL12B
tgtcgtagaattggattggt

SEQ ID NO: 7094 - DNA, 20 bp, Artificial Sequence
  Synthetic: descartes_3007_IL12B
tggcatctcccctcgtggcc

SEQ ID NO: 7095 - DNA, 20 bp, Artificial Sequence
  Synthetic: descartes_3008_IL12B
atacttgagcttgtgaacgg

SEQ ID NO: 7096 - DNA, 20 bp, Artificial Sequence
  Synthetic: descartes_3009_IL12RB1
ctgccccattgccccagact

SEQ ID NO: 7097 - DNA, 20 bp, Artificial Sequence
  Synthetic: descartes_3010_IL12RB1
aggacccgccatatccggat

SEQ ID NO: 7098 - DNA, 20 bp, Artificial Sequence
  Synthetic: descartes_3011_IL12RB1
gtcctggcctgaaccagacg

SEQ ID NO: 7099 - DNA, 20 bp, Artificial Sequence
  Synthetic: descartes_3012_IL12RB1
ggacgccgggacaggtgctc

SEQ ID NO: 7100 - DNA, 20 bp, Artificial Sequence
  Synthetic: descartes_3013_IL12RB1
agggtcagccgcctcctccc

SEQ ID NO: 7101 - DNA, 20 bp, Artificial Sequence
  Synthetic: descartes_3014_IL12RB1
tcccaggacatctctaccac

SEQ ID NO: 7102 - DNA, 20 bp, Artificial Sequence
  Synthetic: descartes_3015_IL12RB1
cctctgcgcaccccgagaag

SEQ ID NO: 7103 - DNA, 20 bp, Artificial Sequence
  Synthetic: descartes_3016_IL12RB1
tgattggctcatcttcttcg

SEQ ID NO: 7104 - DNA, 20 bp, Artificial Sequence
  Synthetic: descartes_3017_IL13RA2
acatgaactctcccgagtaa

SEQ ID NO: 7105 - DNA, 20 bp, Artificial Sequence
  Synthetic: descartes_3018_IL13RA2
gagtgagtggagtgataaac

SEQ ID NO: 7106 - DNA, 20 bp, Artificial Sequence
  Synthetic: descartes_3019_IL13RA2
gaggcatcagactataaaga

SEQ ID NO: 7107 - DNA, 20 bp, Artificial Sequence
  Synthetic: descartes_3020_IL13RA2
gctgtacttcatcttcagac

SEQ ID NO: 7108 - DNA, 20 bp, Artificial Sequence
  Synthetic: descartes_3021_IL13RA2
cgtaagccaaacacctaccc

SEQ ID NO: 7109 - DNA, 20 bp, Artificial Sequence
  Synthetic: descartes_3022_IL13RA2
aggaatgcacagtggaatat

SEQ ID NO: 7110 - DNA, 20 bp, Artificial Sequence
  Synthetic: descartes_3023_IL13RA2
ctcgggagagttcatgtgaa

SEQ ID NO: 7111 - DNA, 20 bp, Artificial Sequence
  Synthetic: descartes_3024_IL13RA2
ccatggcaatgcacaaatgg

SEQ ID NO: 7112 - DNA, 20 bp, Artificial Sequence
  Synthetic: descartes_3025_IL15
agtgcagggcttcctaaaac

SEQ ID NO: 7113 - DNA, 20 bp, Artificial Sequence
  Synthetic: descartes_3026_IL15
gaagtaaacacaagtagcac

SEQ ID NO: 7114 - DNA, 20 bp, Artificial Sequence
  Synthetic: descartes_3027_IL15
cgtatataaagtagcatcaa

SEQ ID NO: 7115 - DNA, 20 bp, Artificial Sequence
  Synthetic: descartes_3028_IL15
ctccagttcctcacattctt

SEQ ID NO: 7116 - DNA, 20 bp, Artificial Sequence
  Synthetic: descartes_3029_IL15
acttgagtccggagatgcaa

SEQ ID NO: 7117 - DNA, 20 bp, Artificial Sequence
  Synthetic: descartes_3030_IL15
taactgaagctggcattcat

SEQ ID NO: 7118 - DNA, 20 bp, Artificial Sequence
  Synthetic: descartes_3031_IL15
tactgtatcatgaatacttg

SEQ ID NO: 7119 - DNA, 20 bp, Artificial Sequence
  Synthetic: descartes_3032_IL15
catccagtgctacttgtgtt

SEQ ID NO: 7120 - DNA, 20 bp, Artificial Sequence
  Synthetic: descartes_3033_IL18
gattcaagcttgccaaagta

SEQ ID NO: 7121 - DNA, 20 bp, Artificial Sequence
  Synthetic: descartes_3034_IL18
attgccacaaagttgatgca

SEQ ID NO: 7122 - DNA, 20 bp, Artificial Sequence
  Synthetic: descartes_3035_IL18
aactctctcctgtgagaaca

SEQ ID NO: 7123 - DNA, 20 bp, Artificial Sequence
  Synthetic: descartes_3036_IL18
aatgaccaagttctcttcat

SEQ ID NO: 7124 - DNA, 20 bp, Artificial Sequence
  Synthetic: descartes_3037_IL18
agagaagtgtcccaggacat

SEQ ID NO: 7125 - DNA, 20 bp, Artificial Sequence
  Synthetic: descartes_3038_IL18
acaagctagaaagtatcctt

SEQ ID NO: 7126 - DNA, 20 bp, Artificial Sequence
  Synthetic: descartes_3039_IL18
aagatatgactgattctgac

SEQ ID NO: 7127 - DNA, 20 bp, Artificial Sequence
  Synthetic: descartes_3040_IL18
tcacacttcacagagatagt

SEQ ID NO: 7128 - DNA, 20 bp, Artificial Sequence
  Synthetic: descartes_3041_IL18R1
atatcaccaaaaccttcaat

SEQ ID NO: 7129 - DNA, 20 bp, Artificial Sequence
  Synthetic: descartes_3042_IL18R1
ggtaagacacaaaagcatca

SEQ ID NO: 7130 - DNA, 20 bp, Artificial Sequence
  Synthetic: descartes_3043_IL18R1
agataacctgtgaaaacagt

SEQ ID NO: 7131 - DNA, 20 bp, Artificial Sequence
  Synthetic: descartes_3044_IL18R1
actgaaagacaagtaactag

SEQ ID NO: 7132 - DNA, 20 bp, Artificial Sequence
  Synthetic: descartes_3045_IL18R1
acgagaagagatgaaacatt

SEQ ID NO: 7133 - DNA, 20 bp, Artificial Sequence
  Synthetic: descartes_3046_IL18R1
gtccaagaagaaccggaact

SEQ ID NO: 7134 - DNA, 20 bp, Artificial Sequence
  Synthetic: descartes_3047_IL18R1
ggtataagttatgcatattt

SEQ ID NO: 7135 - DNA, 20 bp, Artificial Sequence
  Synthetic: descartes_3048_IL18R1
agatagaaaggttccccttc

SEQ ID NO: 7136 - DNA, 20 bp, Artificial Sequence
  Synthetic: descartes_3049_IL18RAP
agtggaaaggactcagtaga

SEQ ID NO: 7137 - DNA, 20 bp, Artificial Sequence
  Synthetic: descartes_3050_IL18RAP
ccagagccacagaaatcaca

SEQ ID NO: 7138 - DNA, 20 bp, Artificial Sequence
  Synthetic: descartes_3051_IL18RAP
gcctcaggtactgagacttc

SEQ ID NO: 7139 - DNA, 20 bp, Artificial Sequence
  Synthetic: descartes_3052_IL18RAP
cataggatacgaaagcatca

SEQ ID NO: 7140 - DNA, 20 bp, Artificial Sequence
  Synthetic: descartes_3053_IL18RAP
acgagatgaggtagagactc

SEQ ID NO: 7141 - DNA, 20 bp, Artificial Sequence
  Synthetic: descartes_3054_IL18RAP
gaagttaagccccagacaaa

SEQ ID NO: 7142 - DNA, 20 bp, Artificial Sequence
  Synthetic: descartes_3055_IL18RAP
tcttgagccccaactatgtc

SEQ ID NO: 7143 - DNA, 20 bp, Artificial Sequence
  Synthetic: descartes_3056_IL18RAP
tgtggctctggtaaatcaca

SEQ ID NO: 7144 - DNA, 20 bp, Artificial Sequence
  Synthetic: descartes_3057_IL1B
tcttcaacaagatagaaatc

SEQ ID NO: 7145 - DNA, 20 bp, Artificial Sequence
  Synthetic: descartes_3058_IL1B
gggccatcagcttcaaagaa

SEQ ID NO: 7146 - DNA, 20 bp, Artificial Sequence
  Synthetic: descartes_3059_IL1B
agtctgcccagttccccaac

SEQ ID NO: 7147 - DNA, 20 bp, Artificial Sequence
  Synthetic: descartes_3060_IL1B
agttcatatggaccagacat

SEQ ID NO: 7148 - DNA, 20 bp, Artificial Sequence
  Synthetic: descartes_3061_IL1B
cttgaggcccaaggccacag

SEQ ID NO: 7149 - DNA, 20 bp, Artificial Sequence
  Synthetic: descartes_3062_IL1B
actggcgagctcaggtactt

SEQ ID NO: 7150 - DNA, 20 bp, Artificial Sequence
  Synthetic: descartes_3063_IL1B
tgcttgagaggtgctgatgt

SEQ ID NO: 7151 - DNA, 20 bp, Artificial Sequence
  Synthetic: descartes_3064_IL1B
ctgtgagtcccggagcgtgc

SEQ ID NO: 7152 - DNA, 20 bp, Artificial Sequence
  Synthetic: descartes_3065_IL1R1
gtgtcatctgcaaatgaaat

SEQ ID NO: 7153 - DNA, 20 bp, Artificial Sequence
  Synthetic: descartes_3066_IL1R1
ccaagaatacacatggtata

SEQ ID NO: 7154 - DNA, 20 bp, Artificial Sequence
  Synthetic: descartes_3067_IL1R1
gatgaaggtgaccgtcgctg

SEQ ID NO: 7155 - DNA, 20 bp, Artificial Sequence
  Synthetic: descartes_3068_IL1R1
cacagggaccacagtctgca

SEQ ID NO: 7156 - DNA, 20 bp, Artificial Sequence
  Synthetic: descartes_3069_IL1R1
tagatgaaaacagaacacac

SEQ ID NO: 7157 - DNA, 20 bp, Artificial Sequence
  Synthetic: descartes_3070_IL1R1
atttgcagatgacactaaaa

SEQ ID NO: 7158 - DNA, 20 bp, Artificial Sequence
  Synthetic: descartes_3071_IL1R1
ggttaagaggacagggacga

SEQ ID NO: 7159 - DNA, 20 bp, Artificial Sequence
  Synthetic: descartes_3072_IL1R1
gtggagtcaaagataggctc

SEQ ID NO: 7160 - DNA, 20 bp, Artificial Sequence
  Synthetic: descartes_3073_IL1RL1
gctatgtctctccagagcag

SEQ ID NO: 7161 - DNA, 20 bp, Artificial Sequence
  Synthetic: descartes_3074_IL1RL1
ggatgataaccaggacattg

SEQ ID NO: 7162 - DNA, 20 bp, Artificial Sequence
  Synthetic: descartes_3075_IL1RL1
atcctgacccctcagatcac

SEQ ID NO: 7163 - DNA, 20 bp, Artificial Sequence
  Synthetic: descartes_3076_IL1RL1
agaatagctgacgtgaagga

SEQ ID NO: 7164 - DNA, 20 bp, Artificial Sequence
  Synthetic: descartes_3077_IL1RL1
cctacgagcaggaggttgcc

SEQ ID NO: 7165 - DNA, 20 bp, Artificial Sequence
  Synthetic: descartes_3078_IL1RL1
tgatccagatactgttgaat

SEQ ID NO: 7166 - DNA, 20 bp, Artificial Sequence
  Synthetic: descartes_3079_IL1RL1
atgctaatcaatgtcctggt

SEQ ID NO: 7167 - DNA, 20 bp, Artificial Sequence
  Synthetic: descartes_3080_IL1RL1
cttgtctaggacatcttaca

SEQ ID NO: 7168 - DNA, 20 bp, Artificial Sequence
  Synthetic: descartes_3081_IL2
acttaagacccagggactta

SEQ ID NO: 7169 - DNA, 20 bp, Artificial Sequence
  Synthetic: descartes_3082_IL2
gctcaaagcaaaaactttca

SEQ ID NO: 7170 - DNA, 20 bp, Artificial Sequence
  Synthetic: descartes_3083_IL2
gcacttcctccagaggtttg

SEQ ID NO: 7171 - DNA, 20 bp, Artificial Sequence
  Synthetic: descartes_3084_IL2
tgacaagtgcaagacttagt

SEQ ID NO: 7172 - DNA, 20 bp, Artificial Sequence
  Synthetic: descartes_3085_IL2
gttccagaactattacgttg

SEQ ID NO: 7173 - DNA, 20 bp, Artificial Sequence
  Synthetic: descartes_3086_IL2
tgaacagatggattaccttt

SEQ ID NO: 7174 - DNA, 20 bp, Artificial Sequence
  Synthetic: descartes_3087_IL2
ctgctggatttacagatgat

SEQ ID NO: 7175 - DNA, 20 bp, Artificial Sequence
  Synthetic: descartes_3088_IL2
acaaaaggtaatccatctgt

SEQ ID NO: 7176 - DNA, 20 bp, Artificial Sequence
  Synthetic: descartes_3089_IL20RB
cagacgaacagtggcacgac

SEQ ID NO: 7177 - DNA, 20 bp, Artificial Sequence
  Synthetic: descartes_3090_IL20RB
taggtgcactggaatacccc

SEQ ID NO: 7178 - DNA, 20 bp, Artificial Sequence
  Synthetic: descartes_3091_IL20RB
acaatggttctagaagaaat

SEQ ID NO: 7179 - DNA, 20 bp, Artificial Sequence
  Synthetic: descartes_3092_IL20RB
ttctagaaccattgtgaaag

SEQ ID NO: 7180 - DNA, 20 bp, Artificial Sequence
  Synthetic: descartes_3093_IL20RB
tattaaagggatgcttcagg

SEQ ID NO: 7181 - DNA, 20 bp, Artificial Sequence
  Synthetic: descartes_3094_IL20RB
tccaggcgcgatcactgggc

SEQ ID NO: 7182 - DNA, 20 bp, Artificial Sequence
  Synthetic: descartes_3095_IL20RB
agttccttgtggcctactgg

SEQ ID NO: 7183 - DNA, 20 bp, Artificial Sequence
  Synthetic: descartes_3096_IL20RB
gtgatctccatcccaggtcg

SEQ ID NO: 7184 - DNA, 20 bp, Artificial Sequence
  Synthetic: descartes_3097_IL21
agctgatcaacaatatctat

SEQ ID NO: 7185 - DNA, 20 bp, Artificial Sequence
  Synthetic: descartes_3098_IL21
tgccagctccagaagatgta

SEQ ID NO: 7186 - DNA, 20 bp, Artificial Sequence
  Synthetic: descartes_3099_IL21
attgatacattgattatcct

SEQ ID NO: 7187 - DNA, 20 bp, Artificial Sequence
  Synthetic: descartes_3100_IL21
agaaggcccaactaaagtca

SEQ ID NO: 7188 - DNA, 20 bp, Artificial Sequence
  Synthetic: descartes_3101_IL21
tcataagaatcacatgaagg

SEQ ID NO: 7189 - DNA, 20 bp, Artificial Sequence
  Synthetic: descartes_3102_IL21
tggaccagtgtccccaagaa

SEQ ID NO: 7190 - DNA, 20 bp, Artificial Sequence
  Synthetic: descartes_3103_IL21
ctgctttcagaaggcccaac

SEQ ID NO: 7191 - DNA, 20 bp, Artificial Sequence
  Synthetic: descartes_3104_IL21
gttgggccttctgaaagcag

SEQ ID NO: 7192 - DNA, 20 bp, Artificial Sequence
  Synthetic: descartes_3105_IL23A
acaggggagccttctctgct

SEQ ID NO: 7193 - DNA, 20 bp, Artificial Sequence
  Synthetic: descartes_3106_IL23A
tgagaagctgctaggatcgg

SEQ ID NO: 7194 - DNA, 20 bp, Artificial Sequence
  Synthetic: descartes_3107_IL23A
acagaagctctgcacactgg

SEQ ID NO: 7195 - DNA, 20 bp, Artificial Sequence
  Synthetic: descartes_3108_IL23A
cccatggagcagcaaccctg

SEQ ID NO: 7196 - DNA, 20 bp, Artificial Sequence
  Synthetic: descartes_3109_IL23A
tagtctcttcatctccctct

SEQ ID NO: 7197 - DNA, 20 bp, Artificial Sequence
  Synthetic: descartes_3110_IL23A
aagcggagaaggagacgctg

SEQ ID NO: 7198 - DNA, 20 bp, Artificial Sequence
  Synthetic: descartes_3111_IL23A
tggctgtagccgcccgggtc

SEQ ID NO: 7199 - DNA, 20 bp, Artificial Sequence
  Synthetic: descartes_3112_IL23R
gagacagaagaagagcaaca

SEQ ID NO: 7200 - DNA, 20 bp, Artificial Sequence
  Synthetic: descartes_3113_IL23R
catatgtgcaacagtcagaa

SEQ ID NO: 7201 - DNA, 20 bp, Artificial Sequence
  Synthetic: descartes_3114_IL23R
aagagacactgatatgtgga

SEQ ID NO: 7202 - DNA, 20 bp, Artificial Sequence
  Synthetic: descartes_3115_IL23R
agatgggtatgaatatctct

SEQ ID NO: 7203 - DNA, 20 bp, Artificial Sequence
  Synthetic: descartes_3116_IL23R
ggtccaagcagcaaacgcac

SEQ ID NO: 7204 - DNA, 20 bp, Artificial Sequence
  Synthetic: descartes_3117_IL23R
gctccaagtagaattctgac

SEQ ID NO: 7205 - DNA, 20 bp, Artificial Sequence
  Synthetic: descartes_3118_IL23R
atattaggaatatcttcata

SEQ ID NO: 7206 - DNA, 20 bp, Artificial Sequence
  Synthetic: descartes_3119_IL23R
aagtgagatgtcaagaaaca

SEQ ID NO: 7207 - DNA, 20 bp, Artificial Sequence
  Synthetic: descartes_3120_IL27RA
gagctagccactggctacaa

SEQ ID NO: 7208 - DNA, 20 bp, Artificial Sequence
  Synthetic: descartes_3121_IL27RA
actgtcggggtcccctatcg

SEQ ID NO: 7209 - DNA, 20 bp, Artificial Sequence
  Synthetic: descartes_3122_IL27RA
gctctggaggtgtaactcgg

SEQ ID NO: 7210 - DNA, 20 bp, Artificial Sequence
  Synthetic: descartes_3123_IL27RA
tccagggggtccccatctcg

SEQ ID NO: 7211 - DNA, 20 bp, Artificial Sequence
  Synthetic: descartes_3124_IL27RA
gcgactccaagatgcccctc

SEQ ID NO: 7212 - DNA, 20 bp, Artificial Sequence
  Synthetic: descartes_3125_IL27RA
cgaggatgaccccctggagg

SEQ ID NO: 7213 - DNA, 20 bp, Artificial Sequence
  Synthetic: descartes_3126_IL27RA
ggtttctaggttcacgaaga

SEQ ID NO: 7214 - DNA, 20 bp, Artificial Sequence
  Synthetic: descartes_3127_IL27RA
tagccagtggctagctccaa

SEQ ID NO: 7215 - DNA, 20 bp, Artificial Sequence
  Synthetic: descartes_3128_IL2RA
ctgtacagagcatatagagt

SEQ ID NO: 7216 - DNA, 20 bp, Artificial Sequence
  Synthetic: descartes_3129_IL2RA
gtggtggggcagatggttta

SEQ ID NO: 7217 - DNA, 20 bp, Artificial Sequence
  Synthetic: descartes_3130_IL2RA
ccatggtggaggttccctgc

SEQ ID NO: 7218 - DNA, 20 bp, Artificial Sequence
  Synthetic: descartes_3131_IL2RA
aaatacagacagaaatggct

SEQ ID NO: 7219 - DNA, 20 bp, Artificial Sequence
  Synthetic: descartes_3132_IL2RA
acctgtgcatatgagctggg

SEQ ID NO: 7220 - DNA, 20 bp, Artificial Sequence
  Synthetic: descartes_3133_IL2RA
ctgctgatcagcgtcctcct

SEQ ID NO: 7221 - DNA, 20 bp, Artificial Sequence
  Synthetic: descartes_3134_IL2RA
cagacgctctcagcaggacc

SEQ ID NO: 7222 - DNA, 20 bp, Artificial Sequence
  Synthetic: descartes_3135_IL2RA
aatgtggcgtgtgggatctc

SEQ ID NO: 7223 - DNA, 20 bp, Artificial Sequence
  Synthetic: descartes_3136_IL31RA
ctatagtagtagacacagga

SEQ ID NO: 7224 - DNA, 20 bp, Artificial Sequence
  Synthetic: descartes_3137_IL31RA
acctgagattccgcccagaa

SEQ ID NO: 7225 - DNA, 20 bp, Artificial Sequence
  Synthetic: descartes_3138_IL31RA
gtaccagatcatctgtgtga

SEQ ID NO: 7226 - DNA, 20 bp, Artificial Sequence
  Synthetic: descartes_3139_IL31RA
ctgtgtctactactatagga

SEQ ID NO: 7227 - DNA, 20 bp, Artificial Sequence
  Synthetic: descartes_3140_IL31RA
ggaggggaaaagaatgggta

SEQ ID NO: 7228 - DNA, 20 bp, Artificial Sequence
  Synthetic: descartes_3141_IL31RA
cttccaagaataacgatccc

SEQ ID NO: 7229 - DNA, 20 bp, Artificial Sequence
  Synthetic: descartes_3142_IL31RA
agcttccacctcaatggtat

SEQ ID NO: 7230 - DNA, 20 bp, Artificial Sequence
  Synthetic: descartes_3143_IL31RA
ctcaggactctcctctcagg

SEQ ID NO: 7231 - DNA, 20 bp, Artificial Sequence
  Synthetic: descartes_3144_IL33
agtacacaaattctcagaag

SEQ ID NO: 7232 - DNA, 20 bp, Artificial Sequence
  Synthetic: descartes_3145_IL33
agagagcttaaacaagatat

SEQ ID NO: 7233 - DNA, 20 bp, Artificial Sequence
  Synthetic: descartes_3146_IL33
gaggatgaaagttatgagat

SEQ ID NO: 7234 - DNA, 20 bp, Artificial Sequence
  Synthetic: descartes_3147_IL33
aagtcttcaacatatatctc

SEQ ID NO: 7235 - DNA, 20 bp, Artificial Sequence
  Synthetic: descartes_3148_IL33
tggacccctgatataccaaa

SEQ ID NO: 7236 - DNA, 20 bp, Artificial Sequence
  Synthetic: descartes_3149_IL33
ggagagaaaccaccaaaagg

SEQ ID NO: 7237 - DNA, 20 bp, Artificial Sequence
  Synthetic: descartes_3150_IL33
gtggtttctctcctaaagta

SEQ ID NO: 7238 - DNA, 20 bp, Artificial Sequence
  Synthetic: descartes_3151_IL33
gtatatcaggggtccagaaa

SEQ ID NO: 7239 - DNA, 20 bp, Artificial Sequence
  Synthetic: descartes_3152_IL4
atgatctcctgtaaggtgat

SEQ ID NO: 7240 - DNA, 20 bp, Artificial Sequence
  Synthetic: descartes_3153_IL4
tccacggacacaagtgcgat

SEQ ID NO: 7241 - DNA, 20 bp, Artificial Sequence
  Synthetic: descartes_3154_IL4
aggaatcggatcagctgctt

SEQ ID NO: 7242 - DNA, 20 bp, Artificial Sequence
  Synthetic: descartes_3155_IL4
caacgtactctggttggctt

SEQ ID NO: 7243 - DNA, 20 bp, Artificial Sequence
  Synthetic: descartes_3156_IL4
gcctttccaagaagttttcc

SEQ ID NO: 7244 - DNA, 20 bp, Artificial Sequence
  Synthetic: descartes_3157_IL4
tctctcatgatcgtctttag

SEQ ID NO: 7245 - DNA, 20 bp, Artificial Sequence
  Synthetic: descartes_3158_IL4
caagaagttttccaacgtac

SEQ ID NO: 7246 - DNA, 20 bp, Artificial Sequence
  Synthetic: descartes_3159_IL4
aatatttctctctcatgatc

SEQ ID NO: 7247 - DNA, 20 bp, Artificial Sequence
  Synthetic: descartes_3160_IL4R
actccaaatgttgactgcat

SEQ ID NO: 7248 - DNA, 20 bp, Artificial Sequence
  Synthetic: descartes_3161_IL4R
tctggggacacagcactgct

SEQ ID NO: 7249 - DNA, 20 bp, Artificial Sequence
  Synthetic: descartes_3162_IL4R
cagagccctggaaaggcatc

SEQ ID NO: 7250 - DNA, 20 bp, Artificial Sequence
  Synthetic: descartes_3163_IL4R
ccccggctccagacccaggt

SEQ ID NO: 7251 - DNA, 20 bp, Artificial Sequence
  Synthetic: descartes_3164_IL4R
atgttgtgctccagaaaaca

SEQ ID NO: 7252 - DNA, 20 bp, Artificial Sequence
  Synthetic: descartes_3165_IL4R
ggggtctggcttgagctctg

SEQ ID NO: 7253 - DNA, 20 bp, Artificial Sequence
  Synthetic: descartes_3166_IL4R
gggctagcagtggggaagag

SEQ ID NO: 7254 - DNA, 20 bp, Artificial Sequence
  Synthetic: descartes_3167_IL4R
ttcctctacctcctcctcct

SEQ ID NO: 7255 - DNA, 20 bp, Artificial Sequence
  Synthetic: descartes_3168_IL6
aggtatacctagagtacctc

SEQ ID NO: 7256 - DNA, 20 bp, Artificial Sequence
  Synthetic: descartes_3169_IL6
agagtagtgaggaacaagcc

SEQ ID NO: 7257 - DNA, 20 bp, Artificial Sequence
  Synthetic: descartes_3170_IL6
acacatgttactcttgttac

SEQ ID NO: 7258 - DNA, 20 bp, Artificial Sequence
  Synthetic: descartes_3171_IL6
gagtttgaggtatacctaga

SEQ ID NO: 7259 - DNA, 20 bp, Artificial Sequence
  Synthetic: descartes_3172_IL6
tgcaggaactggatcaggac

SEQ ID NO: 7260 - DNA, 20 bp, Artificial Sequence
  Synthetic: descartes_3173_IL6
ccgaagagccctcaggctgg

SEQ ID NO: 7261 - DNA, 20 bp, Artificial Sequence
  Synthetic: descartes_3174_IL6
tactcatctgcacagctctg

SEQ ID NO: 7262 - DNA, 20 bp, Artificial Sequence
  Synthetic: descartes_3175_IL6
aggagttcctgcagtccagc

SEQ ID NO: 7263 - DNA, 20 bp, Artificial Sequence
  Synthetic: descartes_3176_IL6R
cagagtcgtggagctgcacc

SEQ ID NO: 7264 - DNA, 20 bp, Artificial Sequence
  Synthetic: descartes_3177_IL6R
agctcagatatcgggctgaa

SEQ ID NO: 7265 - DNA, 20 bp, Artificial Sequence
  Synthetic: descartes_3178_IL6R
tggccacggcagtgactgtg

SEQ ID NO: 7266 - DNA, 20 bp, Artificial Sequence
  Synthetic: descartes_3179_IL6R
ctgaacttgctcccgacact

SEQ ID NO: 7267 - DNA, 20 bp, Artificial Sequence
  Synthetic: descartes_3180_IL6R
cagaatctctgaagagaata

SEQ ID NO: 7268 - DNA, 20 bp, Artificial Sequence
  Synthetic: descartes_3181_IL6R
tacagactacggtttgagct

SEQ ID NO: 7269 - DNA, 20 bp, Artificial Sequence
  Synthetic: descartes_3182_IL6R
accgttcagcccgatatctg

SEQ ID NO: 7270 - DNA, 20 bp, Artificial Sequence
  Synthetic: descartes_3183_IL6R
tgagtggggtcctcggagca

SEQ ID NO: 7271 - DNA, 20 bp, Artificial Sequence
  Synthetic: descartes_3184_IL6ST
ccttccaccatcccactcac

SEQ ID NO: 7272 - DNA, 20 bp, Artificial Sequence
  Synthetic: descartes_3185_IL6ST
gtattataacactcttaata

SEQ ID NO: 7273 - DNA, 20 bp, Artificial Sequence
  Synthetic: descartes_3186_IL6ST
actgatgtaagtgttgtgga

SEQ ID NO: 7274 - DNA, 20 bp, Artificial Sequence
  Synthetic: descartes_3187_IL6ST
ggtggaatggactactccaa

SEQ ID NO: 7275 - DNA, 20 bp, Artificial Sequence
  Synthetic: descartes_3188_IL6ST
actatccctgcctgtgactt

SEQ ID NO: 7276 - DNA, 20 bp, Artificial Sequence
  Synthetic: descartes_3189_IL6ST
agtctaacaaaatcttcctc

SEQ ID NO: 7277 - DNA, 20 bp, Artificial Sequence
  Synthetic: descartes_3190_IL6ST
cccaggcaacagtacttcaa

SEQ ID NO: 7278 - DNA, 20 bp, Artificial Sequence
  Synthetic: descartes_3191_IL6ST
ctattcctaaggagcaatat

SEQ ID NO: 7279 - DNA, 20 bp, Artificial Sequence
  Synthetic: descartes_3192_IL7R
gtagaagctggacatggtga

SEQ ID NO: 7280 - DNA, 20 bp, Artificial Sequence
  Synthetic: descartes_3193_IL7R
aggaaactacaagagatata

SEQ ID NO: 7281 - DNA, 20 bp, Artificial Sequence
  Synthetic: descartes_3194_IL7R
ctcagcaactagaagaatct

SEQ ID NO: 7282 - DNA, 20 bp, Artificial Sequence
  Synthetic: descartes_3195_IL7R
cataacacacaggccaagat

SEQ ID NO: 7283 - DNA, 20 bp, Artificial Sequence
  Synthetic: descartes_3196_IL7R
tctccaatctggaatcctga

SEQ ID NO: 7284 - DNA, 20 bp, Artificial Sequence
  Synthetic: descartes_3197_IL7R
aatgtgagtttcaatcctga

SEQ ID NO: 7285 - DNA, 20 bp, Artificial Sequence
  Synthetic: descartes_3198_IL7R
tggagaaagtggctatgctc

SEQ ID NO: 7286 - DNA, 20 bp, Artificial Sequence
  Synthetic: descartes_3199_IL7R
atacatcacacttgcaaaag

SEQ ID NO: 7287 - DNA, 20 bp, Artificial Sequence
  Synthetic: descartes_3200_ING1
gagggcggaggccaggagga

SEQ ID NO: 7288 - DNA, 20 bp, Artificial Sequence
  Synthetic: descartes_3201_ING1
tgattgagccccacgcacga

SEQ ID NO: 7289 - DNA, 20 bp, Artificial Sequence
  Synthetic: descartes_3202_ING1
aggccgcatctctgctgacc

SEQ ID NO: 7290 - DNA, 20 bp, Artificial Sequence
  Synthetic: descartes_3203_ING1
tctgcaagtcgaaaggcagg

SEQ ID NO: 7291 - DNA, 20 bp, Artificial Sequence
  Synthetic: descartes_3204_ING1
tccagggctttgtccatggt

SEQ ID NO: 7292 - DNA, 20 bp, Artificial Sequence
  Synthetic: descartes_3205_ING1
gatttctccagggctttgtc

SEQ ID NO: 7293 - DNA, 20 bp, Artificial Sequence
  Synthetic: descartes_3206_ING1
gacttgcagagaaatgtctc

SEQ ID NO: 7294 - DNA, 20 bp, Artificial Sequence
  Synthetic: descartes_3207_ING1
ggggaggagcggggtggagg

SEQ ID NO: 7295 - DNA, 20 bp, Artificial Sequence
  Synthetic: descartes_3208_ING2
taggtaagtgaaacacatga

SEQ ID NO: 7296 - DNA, 20 bp, Artificial Sequence
  Synthetic: descartes_3209_ING2
gtagacatcatcaatttcct

SEQ ID NO: 7297 - DNA, 20 bp, Artificial Sequence
  Synthetic: descartes_3210_ING2
ggtggctgatcatcacagtc

SEQ ID NO: 7298 - DNA, 20 bp, Artificial Sequence
  Synthetic: descartes_3211_ING2
acttacctataaaccaaagg

SEQ ID NO: 7299 - DNA, 20 bp, Artificial Sequence
  Synthetic: descartes_3212_ING2
atgtgtttcacttacctata

SEQ ID NO: 7300 - DNA, 20 bp, Artificial Sequence
  Synthetic: descartes_3213_ING2
caatagatcctaatgaacct

SEQ ID NO: 7301 - DNA, 20 bp, Artificial Sequence
  Synthetic: descartes_3214_ING2
atctcccaattcttgactat

SEQ ID NO: 7302 - DNA, 20 bp, Artificial Sequence
  Synthetic: descartes_3215_ING2
tcattatctcccctgcactt

SEQ ID NO: 7303 - DNA, 20 bp, Artificial Sequence
  Synthetic: descartes_3216_ING3
aaatggagctggaagctgat

SEQ ID NO: 7304 - DNA, 20 bp, Artificial Sequence
  Synthetic: descartes_3217_ING3
cctggccattgaaaattctt

SEQ ID NO: 7305 - DNA, 20 bp, Artificial Sequence
  Synthetic: descartes_3218_ING3
aacttagccagttcctgatc

SEQ ID NO: 7306 - DNA, 20 bp, Artificial Sequence
  Synthetic: descartes_3219_ING3
cttagaggcatctgacgtaa

SEQ ID NO: 7307 - DNA, 20 bp, Artificial Sequence
  Synthetic: descartes_3220_ING3
aatctgaagctcttctatcc

SEQ ID NO: 7308 - DNA, 20 bp, Artificial Sequence
  Synthetic: descartes_3221_ING3
cgtgaagcggtcccgcagat

SEQ ID NO: 7309 - DNA, 20 bp, Artificial Sequence
  Synthetic: descartes_3222_ING3
ggtcgtaagtccaatcaacc

SEQ ID NO: 7310 - DNA, 20 bp, Artificial Sequence
  Synthetic: descartes_3223_ING3
gaagatgcagatgagaaggt

SEQ ID NO: 7311 - DNA, 20 bp, Artificial Sequence
  Synthetic: descartes_3224_ING4
cctgtgtggggctgacaacc

SEQ ID NO: 7312 - DNA, 20 bp, Artificial Sequence
  Synthetic: descartes_3225_ING4
cctttgctggaagagctgtc

SEQ ID NO: 7313 - DNA, 20 bp, Artificial Sequence
  Synthetic: descartes_3226_ING4
cccacgctgctcccaagaac

SEQ ID NO: 7314 - DNA, 20 bp, Artificial Sequence
  Synthetic: descartes_3227_ING4
cctttggaacgagcacgagc

SEQ ID NO: 7315 - DNA, 20 bp, Artificial Sequence
  Synthetic: descartes_3228_ING4
gtgacgacaaggtgcagctt

SEQ ID NO: 7316 - DNA, 20 bp, Artificial Sequence
  Synthetic: descartes_3229_ING4
gtctaggtccctcatgagct

SEQ ID NO: 7317 - DNA, 20 bp, Artificial Sequence
  Synthetic: descartes_3230_ING4
gaacgagcacgagcagcttt

SEQ ID NO: 7318 - DNA, 20 bp, Artificial Sequence
  Synthetic: descartes_3231_ING4
ctggaagagctgtcatagtc

SEQ ID NO: 7319 - DNA, 20 bp, Artificial Sequence
  Synthetic: descartes_3232_ING5
gtggtaaggtccacgcaggc

SEQ ID NO: 7320 - DNA, 20 bp, Artificial Sequence
  Synthetic: descartes_3233_ING5
gtgtgtcttcctctgatgtc

SEQ ID NO: 7321 - DNA, 20 bp, Artificial Sequence
  Synthetic: descartes_3234_ING5
ggtccacgggcatgtccagc

SEQ ID NO: 7322 - DNA, 20 bp, Artificial Sequence
  Synthetic: descartes_3235_ING5
accctcgccctccggagctt

SEQ ID NO: 7323 - DNA, 20 bp, Artificial Sequence
  Synthetic: descartes_3236_ING5
actttgcctgcgtggacctt

SEQ ID NO: 7324 - DNA, 20 bp, Artificial Sequence
  Synthetic: descartes_3237_ING5
cctgcgtggaccttaccacg

SEQ ID NO: 7325 - DNA, 20 bp, Artificial Sequence
  Synthetic: descartes_3238_ING5
tgcgtgaaagtgggactcct

SEQ ID NO: 7326 - DNA, 20 bp, Artificial Sequence
  Synthetic: descartes_3239_ING5
aaaatcactgccctccatct

SEQ ID NO: 7327 - DNA, 20 bp, Artificial Sequence
  Synthetic: descartes_3240_INPP5D
tgaggaatccccagagactc

SEQ ID NO: 7328 - DNA, 20 bp, Artificial Sequence
  Synthetic: descartes_3241_INPP5D
agagactgactcgggacaaa

SEQ ID NO: 7329 - DNA, 20 bp, Artificial Sequence
  Synthetic: descartes_3242_INPP5D
cctgccccttggagagaaac

SEQ ID NO: 7330 - DNA, 20 bp, Artificial Sequence
  Synthetic: descartes_3243_INPP5D
agtgatgctggagccactgc

SEQ ID NO: 7331 - DNA, 20 bp, Artificial Sequence
  Synthetic: descartes_3244_INPP5D
ccctcaacagcaaaccgggg

SEQ ID NO: 7332 - DNA, 20 bp, Artificial Sequence
  Synthetic: descartes_3245_INPP5D
gagtcagcaaaaacatattc

SEQ ID NO: 7333 - DNA, 20 bp, Artificial Sequence
  Synthetic: descartes_3246_INPP5D
tccttcctgactcttgacaa

SEQ ID NO: 7334 - DNA, 20 bp, Artificial Sequence
  Synthetic: descartes_3247_INPP5D
cacttacagaattctgccca

SEQ ID NO: 7335 - DNA, 20 bp, Artificial Sequence
  Synthetic: descartes_3248_INTS12
gctgcaaaagctgcccatcc

SEQ ID NO: 7336 - DNA, 20 bp, Artificial Sequence
  Synthetic: descartes_3249_INTS12
cctatggctgacctttccag

SEQ ID NO: 7337 - DNA, 20 bp, Artificial Sequence
  Synthetic: descartes_3250_INTS12
aggagaccagtgctgatgat

SEQ ID NO: 7338 - DNA, 20 bp, Artificial Sequence
  Synthetic: descartes_3251_INTS12
actggtctggcaacatcatc

SEQ ID NO: 7339 - DNA, 20 bp, Artificial Sequence
  Synthetic: descartes_3252_INTS12
cattaagcaagagcccaaaa

SEQ ID NO: 7340 - DNA, 20 bp, Artificial Sequence
  Synthetic: descartes_3253_INTS12
tggttagctgacgaagtagc

SEQ ID NO: 7341 - DNA, 20 bp, Artificial Sequence
  Synthetic: descartes_3254_INTS12
ctggtagtacttccactagg

SEQ ID NO: 7342 - DNA, 20 bp, Artificial Sequence
  Synthetic: descartes_3255_INTS12
aaaccacctccacctctaac

SEQ ID NO: 7343 - DNA, 20 bp, Artificial Sequence
  Synthetic: descartes_3256_IRF1
gctgtaaggaggagccagaa

SEQ ID NO: 7344 - DNA, 20 bp, Artificial Sequence
  Synthetic: descartes_3257_IRF1
gttggaattaatctgcatct

SEQ ID NO: 7345 - DNA, 20 bp, Artificial Sequence
  Synthetic: descartes_3258_IRF1
ccttcctcatcctcatctgt

SEQ ID NO: 7346 - DNA, 20 bp, Artificial Sequence
  Synthetic: descartes_3259_IRF1
tggctcctccttacagctaa

SEQ ID NO: 7347 - DNA, 20 bp, Artificial Sequence
  Synthetic: descartes_3260_IRF1
gctgtgccatgaactccctg

SEQ ID NO: 7348 - DNA, 20 bp, Artificial Sequence
  Synthetic: descartes_3261_IRF1
ttggctgccactccgactgc

SEQ ID NO: 7349 - DNA, 20 bp, Artificial Sequence
  Synthetic: descartes_3262_IRF1
acctcctcgatatctggcag

SEQ ID NO: 7350 - DNA, 20 bp, Artificial Sequence
  Synthetic: descartes_3263_IRF1
ttccggagctgggccattca

SEQ ID NO: 7351 - DNA, 20 bp, Artificial Sequence
  Synthetic: descartes_3264_IRF4
ccagaacacatcagcaatcc

SEQ ID NO: 7352 - DNA, 20 bp, Artificial Sequence
  Synthetic: descartes_3265_IRF4
gctccctcaggaacaatcct

SEQ ID NO: 7353 - DNA, 20 bp, Artificial Sequence
  Synthetic: descartes_3266_IRF4
ccggtagtacaggcagatgt

SEQ ID NO: 7354 - DNA, 20 bp, Artificial Sequence
  Synthetic: descartes_3267_IRF4
cagaccctcagaggcaaaga

SEQ ID NO: 7355 - DNA, 20 bp, Artificial Sequence
  Synthetic: descartes_3268_IRF4
ctgaggggctacgatttacc

SEQ ID NO: 7356 - DNA, 20 bp, Artificial Sequence
  Synthetic: descartes_3269_IRF4
gagaggagtttccagaccct

SEQ ID NO: 7357 - DNA, 20 bp, Artificial Sequence
  Synthetic: descartes_3270_IRF4
aaggaaagttccgagaaggc

SEQ ID NO: 7358 - DNA, 20 bp, Artificial Sequence
  Synthetic: descartes_3271_IRF4
ctctggccattgtcctctgg

SEQ ID NO: 7359 - DNA, 20 bp, Artificial Sequence
  Synthetic: descartes_3272_IRF8
agagaaaaccaacagatcac

SEQ ID NO: 7360 - DNA, 20 bp, Artificial Sequence
  Synthetic: descartes_3273_IRF8
agagcgaccgcactccatct

SEQ ID NO: 7361 - DNA, 20 bp, Artificial Sequence
  Synthetic: descartes_3274_IRF8
ggagaatgaggagaagagca

SEQ ID NO: 7362 - DNA, 20 bp, Artificial Sequence
  Synthetic: descartes_3275_IRF8
caagggatccggaacatgct

SEQ ID NO: 7363 - DNA, 20 bp, Artificial Sequence
  Synthetic: descartes_3276_IRF8
atcatccccatgtaatcgtc

SEQ ID NO: 7364 - DNA, 20 bp, Artificial Sequence
  Synthetic: descartes_3277_IRF8
cgagccatacaaagtttacc

SEQ ID NO: 7365 - DNA, 20 bp, Artificial Sequence
  Synthetic: descartes_3278_IRF8
aagaaggggacaaagctgaa

SEQ ID NO: 7366 - DNA, 20 bp, Artificial Sequence
  Synthetic: descartes_3279_IRF8
aagggaagtttaaagaaggg

SEQ ID NO: 7367 - DNA, 20 bp, Artificial Sequence
  Synthetic: descartes_3280_ITCH
gtgtgtggagtcaccagaca

SEQ ID NO: 7368 - DNA, 20 bp, Artificial Sequence
  Synthetic: descartes_3281_ITCH
tctgcaagcagtagttatcc

SEQ ID NO: 7369 - DNA, 20 bp, Artificial Sequence
  Synthetic: descartes_3282_ITCH
atggtgaggctacccattga

SEQ ID NO: 7370 - DNA, 20 bp, Artificial Sequence
  Synthetic: descartes_3283_ITCH
tgtggaatgcaagagattga

SEQ ID NO: 7371 - DNA, 20 bp, Artificial Sequence
  Synthetic: descartes_3284_ITCH
ccatagaagaaacagaagga

SEQ ID NO: 7372 - DNA, 20 bp, Artificial Sequence
  Synthetic: descartes_3285_ITCH
agtgtctggtgactccacac

SEQ ID NO: 7373 - DNA, 20 bp, Artificial Sequence
  Synthetic: descartes_3286_ITCH
caggagaagaaggtttagat

SEQ ID NO: 7374 - DNA, 20 bp, Artificial Sequence
  Synthetic: descartes_3287_ITCH
aatatgcagggaaggataac

SEQ ID NO: 7375 - DNA, 20 bp, Artificial Sequence
  Synthetic: descartes_3288_ITGAV
ctgggaagtactcctttgcc

SEQ ID NO: 7376 - DNA, 20 bp, Artificial Sequence
  Synthetic: descartes_3289_ITGAV
agtgtgcaccagcagtcaga

SEQ ID NO: 7377 - DNA, 20 bp, Artificial Sequence
  Synthetic: descartes_3290_ITGAV
gagacaaactcactccaatt

SEQ ID NO: 7378 - DNA, 20 bp, Artificial Sequence
  Synthetic: descartes_3291_ITGAV
gtgtagatcgagctatctta

SEQ ID NO: 7379 - DNA, 20 bp, Artificial Sequence
  Synthetic: descartes_3292_ITGAV
tctacagcaggtccccaagt

SEQ ID NO: 7380 - DNA, 20 bp, Artificial Sequence
  Synthetic: descartes_3293_ITGAV
ccatcagagccacgatccat

SEQ ID NO: 7381 - DNA, 20 bp, Artificial Sequence
  Synthetic: descartes_3294_ITGAV
tcttcacccccatatggagc

SEQ ID NO: 7382 - DNA, 20 bp, Artificial Sequence
  Synthetic: descartes_3295_ITGAV
acagaagtatccatctctga

SEQ ID NO: 7383 - DNA, 20 bp, Artificial Sequence
  Synthetic: descartes_3296_ITK
gtgggagaaaaccaagtcat

SEQ ID NO: 7384 - DNA, 20 bp, Artificial Sequence
  Synthetic: descartes_3297_ITK
agtgaaggcaaaatcccgta

SEQ ID NO: 7385 - DNA, 20 bp, Artificial Sequence
  Synthetic: descartes_3298_ITK
gtgcctaaatatcatcctaa

SEQ ID NO: 7386 - DNA, 20 bp, Artificial Sequence
  Synthetic: descartes_3299_ITK
ccttcactgaaaacttccca

SEQ ID NO: 7387 - DNA, 20 bp, Artificial Sequence
  Synthetic: descartes_3300_ITK
ggaggcagaaagccccagtt

SEQ ID NO: 7388 - DNA, 20 bp, Artificial Sequence
  Synthetic: descartes_3301_ITK
gtgcctgtggaactggtgta

SEQ ID NO: 7389 - DNA, 20 bp, Artificial Sequence
  Synthetic: descartes_3302_ITK
atagccaccttgtccttgtt

SEQ ID NO: 7390 - DNA, 20 bp, Artificial Sequence
  Synthetic: descartes_3303_ITK
cttgatgtgataatgcttta

SEQ ID NO: 7391 - DNA, 20 bp, Artificial Sequence
  Synthetic: descartes_3304_ITM2A
gaggcataacaatagaagta

SEQ ID NO: 7392 - DNA, 20 bp, Artificial Sequence
  Synthetic: descartes_3305_ITM2A
tctgatagtgaccctgcagc

SEQ ID NO: 7393 - DNA, 20 bp, Artificial Sequence
  Synthetic: descartes_3306_ITM2A
caggatcctcagaatcaaaa

SEQ ID NO: 7394 - DNA, 20 bp, Artificial Sequence
  Synthetic: descartes_3307_ITM2A
ctccacagcaactaggtctt

SEQ ID NO: 7395 - DNA, 20 bp, Artificial Sequence
  Synthetic: descartes_3308_ITM2A
ccgtggagagatgtgctttt

SEQ ID NO: 7396 - DNA, 20 bp, Artificial Sequence
  Synthetic: descartes_3309_ITM2A
ccaaagagctctaccagatt

SEQ ID NO: 7397 - DNA, 20 bp, Artificial Sequence
  Synthetic: descartes_3310_ITM2A
attctgaggatcctgcaaat

SEQ ID NO: 7398 - DNA, 20 bp, Artificial Sequence
  Synthetic: descartes_3311_ITM2A
aacaaacgtgccattgataa

SEQ ID NO: 7399 - DNA, 20 bp, Artificial Sequence
  Synthetic: descartes_3312_ITPR2
ctgtccccaatatatgtgaa

SEQ ID NO: 7400 - DNA, 20 bp, Artificial Sequence
  Synthetic: descartes_3313_ITPR2
gctgttgctctcttctaccc

SEQ ID NO: 7401 - DNA, 20 bp, Artificial Sequence
  Synthetic: descartes_3314_ITPR2
gcttagtgataaccacatcc

SEQ ID NO: 7402 - DNA, 20 bp, Artificial Sequence
  Synthetic: descartes_3315_ITPR2
gcagaagatactatcacagc

SEQ ID NO: 7403 - DNA, 20 bp, Artificial Sequence
  Synthetic: descartes_3316_ITPR2
gtgttcactataacatcgat

SEQ ID NO: 7404 - DNA, 20 bp, Artificial Sequence
  Synthetic: descartes_3317_ITPR2
gctggagcaccaggtccatt

SEQ ID NO: 7405 - DNA, 20 bp, Artificial Sequence
  Synthetic: descartes_3318_ITPR2
agtccagtgcaggatggaac

SEQ ID NO: 7406 - DNA, 20 bp, Artificial Sequence
  Synthetic: descartes_3319_ITPR2
accaggactatgaagtacaa

SEQ ID NO: 7407 - DNA, 20 bp, Artificial Sequence
  Synthetic: descartes_3320_JADE1
gctgaacccccagggcacat

SEQ ID NO: 7408 - DNA, 20 bp, Artificial Sequence
  Synthetic: descartes_3321_JADE1
ggacagacctgatcactgcc

SEQ ID NO: 7409 - DNA, 20 bp, Artificial Sequence
  Synthetic: descartes_3322_JADE1
ctgtaccagtactggaagtt

SEQ ID NO: 7410 - DNA, 20 bp, Artificial Sequence
  Synthetic: descartes_3323_JADE1
ggtttagaaaagacctttgc

SEQ ID NO: 7411 - DNA, 20 bp, Artificial Sequence
  Synthetic: descartes_3324_JADE1
cctgcgggtcaccatgtaag

SEQ ID NO: 7412 - DNA, 20 bp, Artificial Sequence
  Synthetic: descartes_3325_JADE1
actgggctggcaggtgttgt

SEQ ID NO: 7413 - DNA, 20 bp, Artificial Sequence
  Synthetic: descartes_3326_JADE1
tgaagaatgcagaatgccac

SEQ ID NO: 7414 - DNA, 20 bp, Artificial Sequence
  Synthetic: descartes_3327_JADE1
ccatggtctggcatcaccac

SEQ ID NO: 7415 - DNA, 20 bp, Artificial Sequence
  Synthetic: descartes_3328_JADE2
gctggacacccagggcacac

SEQ ID NO: 7416 - DNA, 20 bp, Artificial Sequence
  Synthetic: descartes_3329_JADE2
acactgagactgatggctac

SEQ ID NO: 7417 - DNA, 20 bp, Artificial Sequence
  Synthetic: descartes_3330_JADE2
cggacagacttgatcacagc

SEQ ID NO: 7418 - DNA, 20 bp, Artificial Sequence
  Synthetic: descartes_3331_JADE2
atctgcaggtggaatatctg

SEQ ID NO: 7419 - DNA, 20 bp, Artificial Sequence
  Synthetic: descartes_3332_JADE2
gagcatcttgatgcggatgt

SEQ ID NO: 7420 - DNA, 20 bp, Artificial Sequence
  Synthetic: descartes_3333_JADE2
tctggagtcgtccgtgaacc

SEQ ID NO: 7421 - DNA, 20 bp, Artificial Sequence
  Synthetic: descartes_3334_JADE2
ctcttcagcttccagtactg

SEQ ID NO: 7422 - DNA, 20 bp, Artificial Sequence
  Synthetic: descartes_3335_JADE2
gttctctcgcgccttgtcac

SEQ ID NO: 7423 - DNA, 20 bp, Artificial Sequence
  Synthetic: descartes_3336_JADE3
cccaccaccaagaattacct

SEQ ID NO: 7424 - DNA, 20 bp, Artificial Sequence
  Synthetic: descartes_3337_JADE3
ggtgacattcccagaccagc

SEQ ID NO: 7425 - DNA, 20 bp, Artificial Sequence
  Synthetic: descartes_3338_JADE3
cctgtctgagctatctttcc

SEQ ID NO: 7426 - DNA, 20 bp, Artificial Sequence
  Synthetic: descartes_3339_JADE3
aaggacctactaaagtgttc

SEQ ID NO: 7427 - DNA, 20 bp, Artificial Sequence
  Synthetic: descartes_3340_JADE3
gtctgaactgtcactgctgc

SEQ ID NO: 7428 - DNA, 20 bp, Artificial Sequence
  Synthetic: descartes_3341_JADE3
gtaggtcctttaaagagacc

SEQ ID NO: 7429 - DNA, 20 bp, Artificial Sequence
  Synthetic: descartes_3342_JADE3
acttgatcctatacattgag

SEQ ID NO: 7430 - DNA, 20 bp, Artificial Sequence
  Synthetic: descartes_3343_JADE3
ccattcccaatggaagactg

SEQ ID NO: 7431 - DNA, 20 bp, Artificial Sequence
  Synthetic: descartes_3344_JAG1
cagtcacagtagaagtcatt

SEQ ID NO: 7432 - DNA, 20 bp, Artificial Sequence
  Synthetic: descartes_3345_JAG1
agggagaccttgcatcacca

SEQ ID NO: 7433 - DNA, 20 bp, Artificial Sequence
  Synthetic: descartes_3346_JAG1
cagagaaaccagtgggacac

SEQ ID NO: 7434 - DNA, 20 bp, Artificial Sequence
  Synthetic: descartes_3347_JAG1
ccgacaaggctgcagtccta

SEQ ID NO: 7435 - DNA, 20 bp, Artificial Sequence
  Synthetic: descartes_3348_JAG1
acagtaggccccctcccagc

SEQ ID NO: 7436 - DNA, 20 bp, Artificial Sequence
  Synthetic: descartes_3349_JAG1
cctcccgactgactcttgca

SEQ ID NO: 7437 - DNA, 20 bp, Artificial Sequence
  Synthetic: descartes_3350_JAG1
aatgggggtcactgtcagaa

SEQ ID NO: 7438 - DNA, 20 bp, Artificial Sequence
  Synthetic: descartes_3351_JAG1
agtgtgtgtgccccccacag

SEQ ID NO: 7439 - DNA, 20 bp, Artificial Sequence
  Synthetic: descartes_3352_JAK2
agatatgtatctagtgatcc

SEQ ID NO: 7440 - DNA, 20 bp, Artificial Sequence
  Synthetic: descartes_3353_JAK2
ccacaaagtggtaccaaaac

SEQ ID NO: 7441 - DNA, 20 bp, Artificial Sequence
  Synthetic: descartes_3354_JAK2
gcacatacattcccatgaat

SEQ ID NO: 7442 - DNA, 20 bp, Artificial Sequence
  Synthetic: descartes_3355_JAK2
gaagcagcaatacagatttc

SEQ ID NO: 7443 - DNA, 20 bp, Artificial Sequence
  Synthetic: descartes_3356_JAK2
ggttaaccaaagtcttgcca

SEQ ID NO: 7444 - DNA, 20 bp, Artificial Sequence
  Synthetic: descartes_3357_JAK2
acatacattgagaagagtaa

SEQ ID NO: 7445 - DNA, 20 bp, Artificial Sequence
  Synthetic: descartes_3358_JAK2
cctcttgaccactgaattcc

SEQ ID NO: 7446 - DNA, 20 bp, Artificial Sequence
  Synthetic: descartes_3359_JAK2
cagcgaccacctccccagtg

SEQ ID NO: 7447 - DNA, 20 bp, Artificial Sequence
  Synthetic: descartes_3360_JAK3
gtggcgtcaccatgcccatc

SEQ ID NO: 7448 - DNA, 20 bp, Artificial Sequence
  Synthetic: descartes_3361_JAK3
gcagatacatgtctatggcc

SEQ ID NO: 7449 - DNA, 20 bp, Artificial Sequence
  Synthetic: descartes_3362_JAK3
acggccaccagggcacctgt

SEQ ID NO: 7450 - DNA, 20 bp, Artificial Sequence
  Synthetic: descartes_3363_JAK3
acaagatccctgctgacagc

SEQ ID NO: 7451 - DNA, 20 bp, Artificial Sequence
  Synthetic: descartes_3364_JAK3
gccagtgctatccttgacct

SEQ ID NO: 7452 - DNA, 20 bp, Artificial Sequence
  Synthetic: descartes_3365_JAK3
tgaggaccggcagcagctgc

SEQ ID NO: 7453 - DNA, 20 bp, Artificial Sequence
  Synthetic: descartes_3366_JAK3
gggcctccccatccaccacc

SEQ ID NO: 7454 - DNA, 20 bp, Artificial Sequence
  Synthetic: descartes_3367_JAK3
ggctggagaagtgccaccgc

SEQ ID NO: 7455 - DNA, 20 bp, Artificial Sequence
  Synthetic: descartes_3368_JAM3
agtggaaagaagaattgcga

SEQ ID NO: 7456 - DNA, 20 bp, Artificial Sequence
  Synthetic: descartes_3369_JAM3
gagcaacgacctcacagcga

SEQ ID NO: 7457 - DNA, 20 bp, Artificial Sequence
  Synthetic: descartes_3370_JAM3
ttgtcaaaaaacacatatgt

SEQ ID NO: 7458 - DNA, 20 bp, Artificial Sequence
  Synthetic: descartes_3371_JAM3
agagtttaagtggaaagaag

SEQ ID NO: 7459 - DNA, 20 bp, Artificial Sequence
  Synthetic: descartes_3372_JAM3
cttgcggtcatttcgagcaa

SEQ ID NO: 7460 - DNA, 20 bp, Artificial Sequence
  Synthetic: descartes_3373_JAM3
cacttaaactctgaaacagg

SEQ ID NO: 7461 - DNA, 20 bp, Artificial Sequence
  Synthetic: descartes_3374_JAM3
agatttacagcccctatcag

SEQ ID NO: 7462 - DNA, 20 bp, Artificial Sequence
  Synthetic: descartes_3375_JAM3
aaattcctgtaccactgggg

SEQ ID NO: 7463 - DNA, 20 bp, Artificial Sequence
  Synthetic: descartes_3376_JARID2
cctgagattgtgtggttgac

SEQ ID NO: 7464 - DNA, 20 bp, Artificial Sequence
  Synthetic: descartes_3377_JARID2
agacacgctgtacccacagc

SEQ ID NO: 7465 - DNA, 20 bp, Artificial Sequence
  Synthetic: descartes_3378_JARID2
gagaggtctgatatctgagt

SEQ ID NO: 7466 - DNA, 20 bp, Artificial Sequence
  Synthetic: descartes_3379_JARID2
ggttcaacctgccactgacc

SEQ ID NO: 7467 - DNA, 20 bp, Artificial Sequence
  Synthetic: descartes_3380_JARID2
acaggaggcgctgtccgcct

SEQ ID NO: 7468 - DNA, 20 bp, Artificial Sequence
  Synthetic: descartes_3381_JARID2
ctgagacagttctcaatgct

SEQ ID NO: 7469 - DNA, 20 bp, Artificial Sequence
  Synthetic: descartes_3382_JARID2
ctaccacccagtggacaagt

SEQ ID NO: 7470 - DNA, 20 bp, Artificial Sequence
  Synthetic: descartes_3383_JARID2
aatggttccagcaggtcaac

SEQ ID NO: 7471 - DNA, 20 bp, Artificial Sequence
  Synthetic: descartes_3384_JCHAIN
gtctcaccaccatatacgag

SEQ ID NO: 7472 - DNA, 20 bp, Artificial Sequence
  Synthetic: descartes_3385_JCHAIN
acatgaacagccttaataaa

SEQ ID NO: 7473 - DNA, 20 bp, Artificial Sequence
  Synthetic: descartes_3386_JCHAIN
tctccacaatgtcctcatta

SEQ ID NO: 7474 - DNA, 20 bp, Artificial Sequence
  Synthetic: descartes_3387_JCHAIN
ttgtcaacaagaacaatcct

SEQ ID NO: 7475 - DNA, 20 bp, Artificial Sequence
  Synthetic: descartes_3388_JCHAIN
tggggagtcctggcggtttt

SEQ ID NO: 7476 - DNA, 20 bp, Artificial Sequence
  Synthetic: descartes_3389_JCHAIN
tgtcataagtgtagcaggtc

SEQ ID NO: 7477 - DNA, 20 bp, Artificial Sequence
  Synthetic: descartes_3390_JCHAIN
caccattttggtctcaccac

SEQ ID NO: 7478 - DNA, 20 bp, Artificial Sequence
  Synthetic: descartes_3391_JCHAIN
cttttctggggagtcctggc

SEQ ID NO: 7479 - DNA, 20 bp, Artificial Sequence
  Synthetic: descartes_3392_JMJD1C
gcagacccagtgaatgttaa

SEQ ID NO: 7480 - DNA, 20 bp, Artificial Sequence
  Synthetic: descartes_3393_JMJD1C
gttgtaaagggagcaacatc

SEQ ID NO: 7481 - DNA, 20 bp, Artificial Sequence
  Synthetic: descartes_3394_JMJD1C
gtaggcaagataccagaaca

SEQ ID NO: 7482 - DNA, 20 bp, Artificial Sequence
  Synthetic: descartes_3395_JMJD1C
tatccagaccacccacacca

SEQ ID NO: 7483 - DNA, 20 bp, Artificial Sequence
  Synthetic: descartes_3396_JMJD1C
atgtgtccacaaactcatag

SEQ ID NO: 7484 - DNA, 20 bp, Artificial Sequence
  Synthetic: descartes_3397_JMJD1C
tgtgccccagctgaagatct

SEQ ID NO: 7485 - DNA, 20 bp, Artificial Sequence
  Synthetic: descartes_3398_JMJD1C
gagaccaccaagctgatctc

SEQ ID NO: 7486 - DNA, 20 bp, Artificial Sequence
  Synthetic: descartes_3399_JMJD1C
gtgtgggtggtctggataca

SEQ ID NO: 7487 - DNA, 20 bp, Artificial Sequence
  Synthetic: descartes_3400_KAT2A
gtagcgggggaggctatcac

SEQ ID NO: 7488 - DNA, 20 bp, Artificial Sequence
  Synthetic: descartes_3401_KAT2A
ccccatagatctcctcctcc

SEQ ID NO: 7489 - DNA, 20 bp, Artificial Sequence
  Synthetic: descartes_3402_KAT2A
tctcatcctctgacacattc

SEQ ID NO: 7490 - DNA, 20 bp, Artificial Sequence
  Synthetic: descartes_3403_KAT2A
ggcagaggtctcaggctgag

SEQ ID NO: 7491 - DNA, 20 bp, Artificial Sequence
  Synthetic: descartes_3404_KAT2A
ccaccagctgccgcgcatgc

SEQ ID NO: 7492 - DNA, 20 bp, Artificial Sequence
  Synthetic: descartes_3405_KAT2A
tccttctccactcggaactt

SEQ ID NO: 7493 - DNA, 20 bp, Artificial Sequence
  Synthetic: descartes_3406_KAT2A
accgttacccgccggcagct

SEQ ID NO: 7494 - DNA, 20 bp, Artificial Sequence
  Synthetic: descartes_3407_KAT2A
cagccattacacttacaggt

SEQ ID NO: 7495 - DNA, 20 bp, Artificial Sequence
  Synthetic: descartes_3408_KAT2B
gtaccgaggtagactgtcgc

SEQ ID NO: 7496 - DNA, 20 bp, Artificial Sequence
  Synthetic: descartes_3409_KAT2B
cctgtgtccacaaggaagaa

SEQ ID NO: 7497 - DNA, 20 bp, Artificial Sequence
  Synthetic: descartes_3410_KAT2B
cctcaagtccagaagaggct

SEQ ID NO: 7498 - DNA, 20 bp, Artificial Sequence
  Synthetic: descartes_3411_KAT2B
tctcagcctcttccagaacc

SEQ ID NO: 7499 - DNA, 20 bp, Artificial Sequence
  Synthetic: descartes_3412_KAT2B
gtcacctgccagcaaaagaa

SEQ ID NO: 7500 - DNA, 20 bp, Artificial Sequence
  Synthetic: descartes_3413_KAT2B
tgtccatgctagaagaagaa

SEQ ID NO: 7501 - DNA, 20 bp, Artificial Sequence
  Synthetic: descartes_3414_KAT2B
aggttacagcacagaagaca

SEQ ID NO: 7502 - DNA, 20 bp, Artificial Sequence
  Synthetic: descartes_3415_KAT2B
tggatacaaagagaactaca

SEQ ID NO: 7503 - DNA, 20 bp, Artificial Sequence
  Synthetic: descartes_3416_KAT5
ccttccactttggagagttc

SEQ ID NO: 7504 - DNA, 20 bp, Artificial Sequence
  Synthetic: descartes_3417_KAT5
cttgaccataagacactgta

SEQ ID NO: 7505 - DNA, 20 bp, Artificial Sequence
  Synthetic: descartes_3418_KAT5
ccgcaagggcaccatctcct

SEQ ID NO: 7506 - DNA, 20 bp, Artificial Sequence
  Synthetic: descartes_3419_KAT5
ggtccagccgctcatgcgtc

SEQ ID NO: 7507 - DNA, 20 bp, Artificial Sequence
  Synthetic: descartes_3420_KAT5
accagcaactccagtgccca

SEQ ID NO: 7508 - DNA, 20 bp, Artificial Sequence
  Synthetic: descartes_3421_KAT5
gccaagtgtttccttgacca

SEQ ID NO: 7509 - DNA, 20 bp, Artificial Sequence
  Synthetic: descartes_3422_KAT5
gcttccgtcctggctgggct

SEQ ID NO: 7510 - DNA, 20 bp, Artificial Sequence
  Synthetic: descartes_3423_KAT5
agattgatggacgtaagaac

SEQ ID NO: 7511 - DNA, 20 bp, Artificial Sequence
  Synthetic: descartes_3424_KAT6A
accccagctcctatgatcat

SEQ ID NO: 7512 - DNA, 20 bp, Artificial Sequence
  Synthetic: descartes_3425_KAT6A
gtgataaaggcactccaata

SEQ ID NO: 7513 - DNA, 20 bp, Artificial Sequence
  Synthetic: descartes_3426_KAT6A
tctggagaccctgcttggcc

SEQ ID NO: 7514 - DNA, 20 bp, Artificial Sequence
  Synthetic: descartes_3427_KAT6A
gatgctaatatgcagaagag

SEQ ID NO: 7515 - DNA, 20 bp, Artificial Sequence
  Synthetic: descartes_3428_KAT6A
ccctgaactaacggttcgag

SEQ ID NO: 7516 - DNA, 20 bp, Artificial Sequence
  Synthetic: descartes_3429_KAT6A
gtgatatccaagaacaagca

SEQ ID NO: 7517 - DNA, 20 bp, Artificial Sequence
  Synthetic: descartes_3430_KAT6A
gaggccatcaaaaaagtgaa

SEQ ID NO: 7518 - DNA, 20 bp, Artificial Sequence
  Synthetic: descartes_3431_KAT6A
cctagagaatacttccgtcg

SEQ ID NO: 7519 - DNA, 20 bp, Artificial Sequence
  Synthetic: descartes_3432_KAT6B
cttgacctcctcctcaatcc

SEQ ID NO: 7520 - DNA, 20 bp, Artificial Sequence
  Synthetic: descartes_3433_KAT6B
agagacgacagaagtactga

SEQ ID NO: 7521 - DNA, 20 bp, Artificial Sequence
  Synthetic: descartes_3434_KAT6B
cctgtgtgaattctgtctta

SEQ ID NO: 7522 - DNA, 20 bp, Artificial Sequence
  Synthetic: descartes_3435_KAT6B
gtccccaaacagaagctaca

SEQ ID NO: 7523 - DNA, 20 bp, Artificial Sequence
  Synthetic: descartes_3436_KAT6B
gctgtgagagatgccaatat

SEQ ID NO: 7524 - DNA, 20 bp, Artificial Sequence
  Synthetic: descartes_3437_KAT6B
tgtggtacctgtagccaaca

SEQ ID NO: 7525 - DNA, 20 bp, Artificial Sequence
  Synthetic: descartes_3438_KAT6B
cttggacgatagtgctttga

SEQ ID NO: 7526 - DNA, 20 bp, Artificial Sequence
  Synthetic: descartes_3439_KAT6B
ccaagtctgcagaccaaaga

SEQ ID NO: 7527 - DNA, 20 bp, Artificial Sequence
  Synthetic: descartes_3440_KAT7
tggaccacaagacattatat

SEQ ID NO: 7528 - DNA, 20 bp, Artificial Sequence
  Synthetic: descartes_3441_KAT7
cttatatcgaagctgtctct

SEQ ID NO: 7529 - DNA, 20 bp, Artificial Sequence
  Synthetic: descartes_3442_KAT7
ttgccatccacttcaaacac

SEQ ID NO: 7530 - DNA, 20 bp, Artificial Sequence
  Synthetic: descartes_3443_KAT7
aaatatatgaagagccaaac

SEQ ID NO: 7531 - DNA, 20 bp, Artificial Sequence
  Synthetic: descartes_3444_KAT7
aacagaattcacacatatag

SEQ ID NO: 7532 - DNA, 20 bp, Artificial Sequence
  Synthetic: descartes_3445_KAT7
ccttccagtatttgagcatc

SEQ ID NO: 7533 - DNA, 20 bp, Artificial Sequence
  Synthetic: descartes_3446_KAT7
gctatccactcatcaatcag

SEQ ID NO: 7534 - DNA, 20 bp, Artificial Sequence
  Synthetic: descartes_3447_KAT7
tacagatctcgagcacacag

SEQ ID NO: 7535 - DNA, 20 bp, Artificial Sequence
  Synthetic: descartes_3448_KAT8
ctggaccataagacactgta

SEQ ID NO: 7536 - DNA, 20 bp, Artificial Sequence
  Synthetic: descartes_3449_KAT8
ctgtcagaacctgtgtctgc

SEQ ID NO: 7537 - DNA, 20 bp, Artificial Sequence
  Synthetic: descartes_3450_KAT8
gtagttcccgatgtggatct

SEQ ID NO: 7538 - DNA, 20 bp, Artificial Sequence
  Synthetic: descartes_3451_KAT8
gttgcgagtgatcttgcgct

SEQ ID NO: 7539 - DNA, 20 bp, Artificial Sequence
  Synthetic: descartes_3452_KAT8
atgtacttgaggcagtactc

SEQ ID NO: 7540 - DNA, 20 bp, Artificial Sequence
  Synthetic: descartes_3453_KAT8
tcaccattccccgaagacta

SEQ ID NO: 7541 - DNA, 20 bp, Artificial Sequence
  Synthetic: descartes_3454_KAT8
aggtgctcctccaccagctt

SEQ ID NO: 7542 - DNA, 20 bp, Artificial Sequence
  Synthetic: descartes_3455_KAT8
tccgatctccaccgtgactt

SEQ ID NO: 7543 - DNA, 20 bp, Artificial Sequence
  Synthetic: descartes_3456_KCNN4
gctgatccccatcacattcc

SEQ ID NO: 7544 - DNA, 20 bp, Artificial Sequence
  Synthetic: descartes_3457_KCNN4
gtatactggatatccatcat

SEQ ID NO: 7545 - DNA, 20 bp, Artificial Sequence
  Synthetic: descartes_3458_KCNN4
ggggcgccgctgacctcccc

SEQ ID NO: 7546 - DNA, 20 bp, Artificial Sequence
  Synthetic: descartes_3459_KCNN4
catgaacacgcaccctggcc

SEQ ID NO: 7547 - DNA, 20 bp, Artificial Sequence
  Synthetic: descartes_3460_KCNN4
accaggaacaggtagagcgc

SEQ ID NO: 7548 - DNA, 20 bp, Artificial Sequence
  Synthetic: descartes_3461_KCNN4
acaaggcagagaagcacgtg

SEQ ID NO: 7549 - DNA, 20 bp, Artificial Sequence
  Synthetic: descartes_3462_KCNN4
tccagggcccggtgtgagct

SEQ ID NO: 7550 - DNA, 20 bp, Artificial Sequence
  Synthetic: descartes_3463_KCNN4
gcatgaaaggccacgatgag

SEQ ID NO: 7551 - DNA, 20 bp, Artificial Sequence
  Synthetic: descartes_3464_KDELR1
gtgatatagaggtagaagaa

SEQ ID NO: 7552 - DNA, 20 bp, Artificial Sequence
  Synthetic: descartes_3465_KDELR1
agggaagagccaggtcctgt

SEQ ID NO: 7553 - DNA, 20 bp, Artificial Sequence
  Synthetic: descartes_3466_KDELR1
ccgcacgctctatctcttca

SEQ ID NO: 7554 - DNA, 20 bp, Artificial Sequence
  Synthetic: descartes_3467_KDELR1
gagggcttcttcgacctcat

SEQ ID NO: 7555 - DNA, 20 bp, Artificial Sequence
  Synthetic: descartes_3468_KDELR1
tagcaagttcaaagctactt

SEQ ID NO: 7556 - DNA, 20 bp, Artificial Sequence
  Synthetic: descartes_3469_KDELR1
ctgtggtgttcactgcccga

SEQ ID NO: 7557 - DNA, 20 bp, Artificial Sequence
  Synthetic: descartes_3470_KDELR1
agcagtagcaagatgatggc

SEQ ID NO: 7558 - DNA, 20 bp, Artificial Sequence
  Synthetic: descartes_3471_KDELR1
aacttgctataaatcaacca

SEQ ID NO: 7559 - DNA, 20 bp, Artificial Sequence
  Synthetic: descartes_3472_KDM1A
actaagaactcggcagtaat

SEQ ID NO: 7560 - DNA, 20 bp, Artificial Sequence
  Synthetic: descartes_3473_KDM1A
gcagaaggcctagacattaa

SEQ ID NO: 7561 - DNA, 20 bp, Artificial Sequence
  Synthetic: descartes_3474_KDM1A
catgataccagcagcttctc

SEQ ID NO: 7562 - DNA, 20 bp, Artificial Sequence
  Synthetic: descartes_3475_KDM1A
cagatgatcctgcagcaaca

SEQ ID NO: 7563 - DNA, 20 bp, Artificial Sequence
  Synthetic: descartes_3476_KDM1A
actatcttcttccaatgttc

SEQ ID NO: 7564 - DNA, 20 bp, Artificial Sequence
  Synthetic: descartes_3477_KDM1A
atgtctaggccttctgctaa

SEQ ID NO: 7565 - DNA, 20 bp, Artificial Sequence
  Synthetic: descartes_3478_KDM1A
gcaaaggaaactatgtagct

SEQ ID NO: 7566 - DNA, 20 bp, Artificial Sequence
  Synthetic: descartes_3479_KDM1A
accggttgctagaagctaca

SEQ ID NO: 7567 - DNA, 20 bp, Artificial Sequence
  Synthetic: descartes_3480_KDM1B
atggcagaccagcaactccc

SEQ ID NO: 7568 - DNA, 20 bp, Artificial Sequence
  Synthetic: descartes_3481_KDM1B
tgaccagaaaaggtctcatc

SEQ ID NO: 7569 - DNA, 20 bp, Artificial Sequence
  Synthetic: descartes_3482_KDM1B
ctggtgaccacactctgcta

SEQ ID NO: 7570 - DNA, 20 bp, Artificial Sequence
  Synthetic: descartes_3483_KDM1B
ataccgcatcgataagtctt

SEQ ID NO: 7571 - DNA, 20 bp, Artificial Sequence
  Synthetic: descartes_3484_KDM1B
gtcacgttcctcccagtgcc

SEQ ID NO: 7572 - DNA, 20 bp, Artificial Sequence
  Synthetic: descartes_3485_KDM1B
cttggtaagctgcctccatt

SEQ ID NO: 7573 - DNA, 20 bp, Artificial Sequence
  Synthetic: descartes_3486_KDM1B
tggtcataaaatacagtatt

SEQ ID NO: 7574 - DNA, 20 bp, Artificial Sequence
  Synthetic: descartes_3487_KDM1B
ctgtcccaaaatctatacgg

SEQ ID NO: 7575 - DNA, 20 bp, Artificial Sequence
  Synthetic: descartes_3488_KDM2A
ccagaggcagaatatctaac

SEQ ID NO: 7576 - DNA, 20 bp, Artificial Sequence
  Synthetic: descartes_3489_KDM2A
gccacaccaggctggagaat

SEQ ID NO: 7577 - DNA, 20 bp, Artificial Sequence
  Synthetic: descartes_3490_KDM2A
cctgacagcagccaattctc

SEQ ID NO: 7578 - DNA, 20 bp, Artificial Sequence
  Synthetic: descartes_3491_KDM2A
gctatccattctactatgag

SEQ ID NO: 7579 - DNA, 20 bp, Artificial Sequence
  Synthetic: descartes_3492_KDM2A
gccactgtactataggaact

SEQ ID NO: 7580 - DNA, 20 bp, Artificial Sequence
  Synthetic: descartes_3493_KDM2A
gagtgatctgcttgcatcct

SEQ ID NO: 7581 - DNA, 20 bp, Artificial Sequence
  Synthetic: descartes_3494_KDM2A
ccactactgcagagacatga

SEQ ID NO: 7582 - DNA, 20 bp, Artificial Sequence
  Synthetic: descartes_3495_KDM2A
actgcatagggatgttgaag

SEQ ID NO: 7583 - DNA, 20 bp, Artificial Sequence
  Synthetic: descartes_3496_KDM2B
gtggggggtgatcctctgca

SEQ ID NO: 7584 - DNA, 20 bp, Artificial Sequence
  Synthetic: descartes_3497_KDM2B
cctgacagcacccactcctc

SEQ ID NO: 7585 - DNA, 20 bp, Artificial Sequence
  Synthetic: descartes_3498_KDM2B
gctgattcctccaacgctgc

SEQ ID NO: 7586 - DNA, 20 bp, Artificial Sequence
  Synthetic: descartes_3499_KDM2B
attgcagatggagcactcca

SEQ ID NO: 7587 - DNA, 20 bp, Artificial Sequence
  Synthetic: descartes_3500_KDM2B
cgccgaacaccaaagagtct

SEQ ID NO: 7588 - DNA, 20 bp, Artificial Sequence
  Synthetic: descartes_3501_KDM2B
ggtgccctgtccctgccctc

SEQ ID NO: 7589 - DNA, 20 bp, Artificial Sequence
  Synthetic: descartes_3502_KDM2B
aactatgagtacgtacagag

SEQ ID NO: 7590 - DNA, 20 bp, Artificial Sequence
  Synthetic: descartes_3503_KDM2B
acagtccgagacgtcaaact

SEQ ID NO: 7591 - DNA, 20 bp, Artificial Sequence
  Synthetic: descartes_3504_KDM3A
gctgaacgaaagtcacctga

SEQ ID NO: 7592 - DNA, 20 bp, Artificial Sequence
  Synthetic: descartes_3505_KDM3A
acagacccagctaaactcaa

SEQ ID NO: 7593 - DNA, 20 bp, Artificial Sequence
  Synthetic: descartes_3506_KDM3A
gttaaaggtaaccacaagcc

SEQ ID NO: 7594 - DNA, 20 bp, Artificial Sequence
  Synthetic: descartes_3507_KDM3A
gctgggtctgtcaaaaccga

SEQ ID NO: 7595 - DNA, 20 bp, Artificial Sequence
  Synthetic: descartes_3508_KDM3A
gctggagaaaaaccgactct

SEQ ID NO: 7596 - DNA, 20 bp, Artificial Sequence
  Synthetic: descartes_3509_KDM3A
ccacaccgacgttaccaaga

SEQ ID NO: 7597 - DNA, 20 bp, Artificial Sequence
  Synthetic: descartes_3510_KDM3A
gagtatgtgtggactgctac

SEQ ID NO: 7598 - DNA, 20 bp, Artificial Sequence
  Synthetic: descartes_3511_KDM3A
gtgttaagaagccttctacc

SEQ ID NO: 7599 - DNA, 20 bp, Artificial Sequence
  Synthetic: descartes_3512_KDM3B
cctaccagtaactacttcac

SEQ ID NO: 7600 - DNA, 20 bp, Artificial Sequence
  Synthetic: descartes_3513_KDM3B
acaggagaacaaagctcctt

SEQ ID NO: 7601 - DNA, 20 bp, Artificial Sequence
  Synthetic: descartes_3514_KDM3B
gctgtagctctgcacaagag

SEQ ID NO: 7602 - DNA, 20 bp, Artificial Sequence
  Synthetic: descartes_3515_KDM3B
ggacatgcattgaaaaaaca

SEQ ID NO: 7603 - DNA, 20 bp, Artificial Sequence
  Synthetic: descartes_3516_KDM3B
cccaggagtgttgcttccag

SEQ ID NO: 7604 - DNA, 20 bp, Artificial Sequence
  Synthetic: descartes_3517_KDM3B
tctgggggacaaatgtagac

SEQ ID NO: 7605 - DNA, 20 bp, Artificial Sequence
  Synthetic: descartes_3518_KDM3B
aatgagtcccgactagaaga

SEQ ID NO: 7606 - DNA, 20 bp, Artificial Sequence
  Synthetic: descartes_3519_KDM3B
tgtacccccgaaaccagcac

SEQ ID NO: 7607 - DNA, 20 bp, Artificial Sequence
  Synthetic: descartes_3520_KDM4A
cctagaagagaataagaagt

SEQ ID NO: 7608 - DNA, 20 bp, Artificial Sequence
  Synthetic: descartes_3521_KDM4A
gccccccagaagcagaggac

SEQ ID NO: 7609 - DNA, 20 bp, Artificial Sequence
  Synthetic: descartes_3522_KDM4A
ccaggaagtgctcaaagctg

SEQ ID NO: 7610 - DNA, 20 bp, Artificial Sequence
  Synthetic: descartes_3523_KDM4A
acagagaaagaggttaagca

SEQ ID NO: 7611 - DNA, 20 bp, Artificial Sequence
  Synthetic: descartes_3524_KDM4A
actgtgcggagtctaccaat

SEQ ID NO: 7612 - DNA, 20 bp, Artificial Sequence
  Synthetic: descartes_3525_KDM4A
atagagggtaccattcacat

SEQ ID NO: 7613 - DNA, 20 bp, Artificial Sequence
  Synthetic: descartes_3526_KDM4A
ggaactcttccatagttgga

SEQ ID NO: 7614 - DNA, 20 bp, Artificial Sequence
  Synthetic: descartes_3527_KDM4A
cccgttaatgctgaagaaat

SEQ ID NO: 7615 - DNA, 20 bp, Artificial Sequence
  Synthetic: descartes_3528_KDM4B
gcccaaccatggaagaattt

SEQ ID NO: 7616 - DNA, 20 bp, Artificial Sequence
  Synthetic: descartes_3529_KDM4B
cctacggctaccacgccggc

SEQ ID NO: 7617 - DNA, 20 bp, Artificial Sequence
  Synthetic: descartes_3530_KDM4B
ccccatggagctgacggggc

SEQ ID NO: 7618 - DNA, 20 bp, Artificial Sequence
  Synthetic: descartes_3531_KDM4B
cccagaagggtccgacctgg

SEQ ID NO: 7619 - DNA, 20 bp, Artificial Sequence
  Synthetic: descartes_3532_KDM4B
gtctccatgcgacctgcccc

SEQ ID NO: 7620 - DNA, 20 bp, Artificial Sequence
  Synthetic: descartes_3533_KDM4B
caaattgaagatggagatca

SEQ ID NO: 7621 - DNA, 20 bp, Artificial Sequence
  Synthetic: descartes_3534_KDM4B
aggacgggtcccagctgacg

SEQ ID NO: 7622 - DNA, 20 bp, Artificial Sequence
  Synthetic: descartes_3535_KDM4B
tccggggaggaagatgtgag

SEQ ID NO: 7623 - DNA, 20 bp, Artificial Sequence
  Synthetic: descartes_3536_KDM4C
gaggtagacctagcacactg

SEQ ID NO: 7624 - DNA, 20 bp, Artificial Sequence
  Synthetic: descartes_3537_KDM4C
agaggaggtgctcttaagca

SEQ ID NO: 7625 - DNA, 20 bp, Artificial Sequence
  Synthetic: descartes_3538_KDM4C
gatgaagagttacccaagag

SEQ ID NO: 7626 - DNA, 20 bp, Artificial Sequence
  Synthetic: descartes_3539_KDM4C
catgctccggaggtatagca

SEQ ID NO: 7627 - DNA, 20 bp, Artificial Sequence
  Synthetic: descartes_3540_KDM4C
aagatggatcccagatagca

SEQ ID NO: 7628 - DNA, 20 bp, Artificial Sequence
  Synthetic: descartes_3541_KDM4C
ctcacaaagatatccattga

SEQ ID NO: 7629 - DNA, 20 bp, Artificial Sequence
  Synthetic: descartes_3542_KDM4C
aactgtgcagaatctacaaa

SEQ ID NO: 7630 - DNA, 20 bp, Artificial Sequence
  Synthetic: descartes_3543_KDM4C
tagtgaagaaaatatagaat

SEQ ID NO: 7631 - DNA, 20 bp, Artificial Sequence
  Synthetic: descartes_3544_KDM4D
gctccaaatcttcgaaattc

SEQ ID NO: 7632 - DNA, 20 bp, Artificial Sequence
  Synthetic: descartes_3545_KDM4D
tgaggagggcgaccacgacc

SEQ ID NO: 7633 - DNA, 20 bp, Artificial Sequence
  Synthetic: descartes_3546_KDM4D
atccaaccaaagaagagttt

SEQ ID NO: 7634 - DNA, 20 bp, Artificial Sequence
  Synthetic: descartes_3547_KDM4D
cctatggctaccatgctggc

SEQ ID NO: 7635 - DNA, 20 bp, Artificial Sequence
  Synthetic: descartes_3548_KDM4D
cttgagaactgtaggcgaga

SEQ ID NO: 7636 - DNA, 20 bp, Artificial Sequence
  Synthetic: descartes_3549_KDM4D
cacatgccaaagtacaagta

SEQ ID NO: 7637 - DNA, 20 bp, Artificial Sequence
  Synthetic: descartes_3550_KDM4D
ccactccgcgatggattgat

SEQ ID NO: 7638 - DNA, 20 bp, Artificial Sequence
  Synthetic: descartes_3551_KDM4D
atgaaaacactaaacaatgg

SEQ ID NO: 7639 - DNA, 20 bp, Artificial Sequence
  Synthetic: descartes_3552_KDM4E
cctggcacacagaggacatg

SEQ ID NO: 7640 - DNA, 20 bp, Artificial Sequence
  Synthetic: descartes_3553_KDM4E
ggagaagcctcaggcccaga

SEQ ID NO: 7641 - DNA, 20 bp, Artificial Sequence
  Synthetic: descartes_3554_KDM4E
ccactccacgatggattgat

SEQ ID NO: 7642 - DNA, 20 bp, Artificial Sequence
  Synthetic: descartes_3555_KDM4E
cctatggctaccatgctggc

SEQ ID NO: 7643 - DNA, 20 bp, Artificial Sequence
  Synthetic: descartes_3556_KDM4E
atgggtacaaggagtagagc

SEQ ID NO: 7644 - DNA, 20 bp, Artificial Sequence
  Synthetic: descartes_3557_KDM4E
ggttgtaacagtgccctgag

SEQ ID NO: 7645 - DNA, 20 bp, Artificial Sequence
  Synthetic: descartes_3558_KDM4E
cttgagaactgtaggcgaga

SEQ ID NO: 7646 - DNA, 20 bp, Artificial Sequence
  Synthetic: descartes_3559_KDM4E
ggctccccaaagtgcaggta

SEQ ID NO: 7647 - DNA, 20 bp, Artificial Sequence
  Synthetic: descartes_3560_KDM5A
ggaagaggaacacagctgtt

SEQ ID NO: 7648 - DNA, 20 bp, Artificial Sequence
  Synthetic: descartes_3561_KDM5A
gtccgagtcctcccactatc

SEQ ID NO: 7649 - DNA, 20 bp, Artificial Sequence
  Synthetic: descartes_3562_KDM5A
tctctaccacagggatcttc

SEQ ID NO: 7650 - DNA, 20 bp, Artificial Sequence
  Synthetic: descartes_3563_KDM5A
ggtatcagtgctgagaacct

SEQ ID NO: 7651 - DNA, 20 bp, Artificial Sequence
  Synthetic: descartes_3564_KDM5A
gccagggcagaggatagttc

SEQ ID NO: 7652 - DNA, 20 bp, Artificial Sequence
  Synthetic: descartes_3565_KDM5A
atgggaatctcttcatcaca

SEQ ID NO: 7653 - DNA, 20 bp, Artificial Sequence
  Synthetic: descartes_3566_KDM5A
ccactcccatatacaccaat

SEQ ID NO: 7654 - DNA, 20 bp, Artificial Sequence
  Synthetic: descartes_3567_KDM5A
cccgaccacaaaacatacaa

SEQ ID NO: 7655 - DNA, 20 bp, Artificial Sequence
  Synthetic: descartes_3568_KDM5B
atgccacatatatcagcagt

SEQ ID NO: 7656 - DNA, 20 bp, Artificial Sequence
  Synthetic: descartes_3569_KDM5B
agagtacttccctgtaactc

SEQ ID NO: 7657 - DNA, 20 bp, Artificial Sequence
  Synthetic: descartes_3570_KDM5B
actgaaagcaaggagactgc

SEQ ID NO: 7658 - DNA, 20 bp, Artificial Sequence
  Synthetic: descartes_3571_KDM5B
ccacgatgagatgatctgca

SEQ ID NO: 7659 - DNA, 20 bp, Artificial Sequence
  Synthetic: descartes_3572_KDM5B
agcagaacgaactaattcat

SEQ ID NO: 7660 - DNA, 20 bp, Artificial Sequence
  Synthetic: descartes_3573_KDM5B
gaacaagcccgttggctaga

SEQ ID NO: 7661 - DNA, 20 bp, Artificial Sequence
  Synthetic: descartes_3574_KDM5B
ccaggagcaaaccccatctt

SEQ ID NO: 7662 - DNA, 20 bp, Artificial Sequence
  Synthetic: descartes_3575_KDM5B
gatgatatgagacgtctcat

SEQ ID NO: 7663 - DNA, 20 bp, Artificial Sequence
  Synthetic: descartes_3576_KDM5C
ggttccaaccactggtagca

SEQ ID NO: 7664 - DNA, 20 bp, Artificial Sequence
  Synthetic: descartes_3577_KDM5C
cctgtcagtgacagtaaacg

SEQ ID NO: 7665 - DNA, 20 bp, Artificial Sequence
  Synthetic: descartes_3578_KDM5C
gtgtcccattcccaccaggc

SEQ ID NO: 7666 - DNA, 20 bp, Artificial Sequence
  Synthetic: descartes_3579_KDM5C
ctgtcagccctggcctgcta

SEQ ID NO: 7667 - DNA, 20 bp, Artificial Sequence
  Synthetic: descartes_3580_KDM5C
gaagaagtgatgaagaagct

SEQ ID NO: 7668 - DNA, 20 bp, Artificial Sequence
  Synthetic: descartes_3581_KDM5C
atagggataaacaatgcgtt

SEQ ID NO: 7669 - DNA, 20 bp, Artificial Sequence
  Synthetic: descartes_3582_KDM5C
ccagcctccagaactccttc

SEQ ID NO: 7670 - DNA, 20 bp, Artificial Sequence
  Synthetic: descartes_3583_KDM5C
ctgtcactgacagggaaacc

SEQ ID NO: 7671 - DNA, 20 bp, Artificial Sequence
  Synthetic: descartes_3584_KDM5D
actgaagctcctgttgaaca

SEQ ID NO: 7672 - DNA, 20 bp, Artificial Sequence
  Synthetic: descartes_3585_KDM5D
ctgtcagcaatagcaaacaa

SEQ ID NO: 7673 - DNA, 20 bp, Artificial Sequence
  Synthetic: descartes_3586_KDM5D
ggacctggcccatatatctg

SEQ ID NO: 7674 - DNA, 20 bp, Artificial Sequence
  Synthetic: descartes_3587_KDM5D
gaggaggtgatgaagatgct

SEQ ID NO: 7675 - DNA, 20 bp, Artificial Sequence
  Synthetic: descartes_3588_KDM5D
accaaaactctgcaaactgt

SEQ ID NO: 7676 - DNA, 20 bp, Artificial Sequence
  Synthetic: descartes_3589_KDM5D
gttatgggtgccaagatagc

SEQ ID NO: 7677 - DNA, 20 bp, Artificial Sequence
  Synthetic: descartes_3590_KDM5D
ataggggtaaataatgcgtt

SEQ ID NO: 7678 - DNA, 20 bp, Artificial Sequence
  Synthetic: descartes_3591_KDM5D
gcagtggctttcctgtcagc

SEQ ID NO: 7679 - DNA, 20 bp, Artificial Sequence
  Synthetic: descartes_3592_KDM6A
gtggaagctaacaatgaaca

SEQ ID NO: 7680 - DNA, 20 bp, Artificial Sequence
  Synthetic: descartes_3593_KDM6A
acagaagtcattcagaacac

SEQ ID NO: 7681 - DNA, 20 bp, Artificial Sequence
  Synthetic: descartes_3594_KDM6A
gagatactgaatagcatagc

SEQ ID NO: 7682 - DNA, 20 bp, Artificial Sequence
  Synthetic: descartes_3595_KDM6A
ataggcaataatcatataac

SEQ ID NO: 7683 - DNA, 20 bp, Artificial Sequence
  Synthetic: descartes_3596_KDM6A
acattgcccacttatatgaa

SEQ ID NO: 7684 - DNA, 20 bp, Artificial Sequence
  Synthetic: descartes_3597_KDM6A
tgtggtgtcaaacaccatga

SEQ ID NO: 7685 - DNA, 20 bp, Artificial Sequence
  Synthetic: descartes_3598_KDM6A
ccatcaacaaggcagagagc

SEQ ID NO: 7686 - DNA, 20 bp, Artificial Sequence
  Synthetic: descartes_3599_KDM6A
atggggctctgagattcttc

SEQ ID NO: 7687 - DNA, 20 bp, Artificial Sequence
  Synthetic: descartes_3600_KDM6B
gagggtctgtacagaactgc

SEQ ID NO: 7688 - DNA, 20 bp, Artificial Sequence
  Synthetic: descartes_3601_KDM6B
gcaccaacatcgacttgtct

SEQ ID NO: 7689 - DNA, 20 bp, Artificial Sequence
  Synthetic: descartes_3602_KDM6B
ctggggtgcccagaactact

SEQ ID NO: 7690 - DNA, 20 bp, Artificial Sequence
  Synthetic: descartes_3603_KDM6B
tgtgggcactcaggattctc

SEQ ID NO: 7691 - DNA, 20 bp, Artificial Sequence
  Synthetic: descartes_3604_KDM6B
cccccactccgctggaggac

SEQ ID NO: 7692 - DNA, 20 bp, Artificial Sequence
  Synthetic: descartes_3605_KDM6B
ccctgcccagtctgtgaaac

SEQ ID NO: 7693 - DNA, 20 bp, Artificial Sequence
  Synthetic: descartes_3606_KDM6B
ccggggcagcttctcctcag

SEQ ID NO: 7694 - DNA, 20 bp, Artificial Sequence
  Synthetic: descartes_3607_KDM6B
aggagccagccgaattcaag

SEQ ID NO: 7695 - DNA, 20 bp, Artificial Sequence
  Synthetic: descartes_3608_KDM7A
gctacaaaccaacatatggc

SEQ ID NO: 7696 - DNA, 20 bp, Artificial Sequence
  Synthetic: descartes_3609_KDM7A
gctatatcagggacctccac

SEQ ID NO: 7697 - DNA, 20 bp, Artificial Sequence
  Synthetic: descartes_3610_KDM7A
actatctgctgtataaagac

SEQ ID NO: 7698 - DNA, 20 bp, Artificial Sequence
  Synthetic: descartes_3611_KDM7A
ggaccataatagggacatca

SEQ ID NO: 7699 - DNA, 20 bp, Artificial Sequence
  Synthetic: descartes_3612_KDM7A
cacgtgtgaaatcagaactc

SEQ ID NO: 7700 - DNA, 20 bp, Artificial Sequence
  Synthetic: descartes_3613_KDM7A
gggggaacttcctgcacaac

SEQ ID NO: 7701 - DNA, 20 bp, Artificial Sequence
  Synthetic: descartes_3614_KDM7A
tgtgtagtcatgtctgtgcc

SEQ ID NO: 7702 - DNA, 20 bp, Artificial Sequence
  Synthetic: descartes_3615_KDM7A
tgatgaaccttcctttctga

SEQ ID NO: 7703 - DNA, 20 bp, Artificial Sequence
  Synthetic: descartes_3616_KDM8
gagtatatccaggagatcgc

SEQ ID NO: 7704 - DNA, 20 bp, Artificial Sequence
  Synthetic: descartes_3617_KDM8
attccagatgtgaagttaga

SEQ ID NO: 7705 - DNA, 20 bp, Artificial Sequence
  Synthetic: descartes_3618_KDM8
ccaaggccccattcctgtcc

SEQ ID NO: 7706 - DNA, 20 bp, Artificial Sequence
  Synthetic: descartes_3619_KDM8
gtccccagggaaccatctcc

SEQ ID NO: 7707 - DNA, 20 bp, Artificial Sequence
  Synthetic: descartes_3620_KDM8
accgggatgaacaggatctc

SEQ ID NO: 7708 - DNA, 20 bp, Artificial Sequence
  Synthetic: descartes_3621_KDM8
ctggggatcctgatgtagtg

SEQ ID NO: 7709 - DNA, 20 bp, Artificial Sequence
  Synthetic: descartes_3622_KDM8
gttccagggaggcccgtgat

SEQ ID NO: 7710 - DNA, 20 bp, Artificial Sequence
  Synthetic: descartes_3623_KDM8
ctcctcctccccatcgccca

SEQ ID NO: 7711 - DNA, 20 bp, Artificial Sequence
  Synthetic: descartes_3624_KLHL6
gaagggcccctggcaccttc

SEQ ID NO: 7712 - DNA, 20 bp, Artificial Sequence
  Synthetic: descartes_3625_KLHL6
aatgtcacgcatgcaaactc

SEQ ID NO: 7713 - DNA, 20 bp, Artificial Sequence
  Synthetic: descartes_3626_KLHL6
ccattgggccctcccccgat

SEQ ID NO: 7714 - DNA, 20 bp, Artificial Sequence
  Synthetic: descartes_3627_KLHL6
aaggaaaagtatgagaaaag

SEQ ID NO: 7715 - DNA, 20 bp, Artificial Sequence
  Synthetic: descartes_3628_KLHL6
aatgatgtaactctgaacct

SEQ ID NO: 7716 - DNA, 20 bp, Artificial Sequence
  Synthetic: descartes_3629_KLHL6
aatactcaatctgaatccac

SEQ ID NO: 7717 - DNA, 20 bp, Artificial Sequence
  Synthetic: descartes_3630_KLHL6
ggaacgcaccaagcccagga

SEQ ID NO: 7718 - DNA, 20 bp, Artificial Sequence
  Synthetic: descartes_3631_KLHL6
tgggagggctcatctgtaga

SEQ ID NO: 7719 - DNA, 20 bp, Artificial Sequence
  Synthetic: descartes_3632_KLK1
aggtccacacactggagatc

SEQ ID NO: 7720 - DNA, 20 bp, Artificial Sequence
  Synthetic: descartes_3633_KLK1
acgacgaaaacacagcccag

SEQ ID NO: 7721 - DNA, 20 bp, Artificial Sequence
  Synthetic: descartes_3634_KLK1
gtcgtcaaacaagttgtggc

SEQ ID NO: 7722 - DNA, 20 bp, Artificial Sequence
  Synthetic: descartes_3635_KLK1
cagatgatctccagtgtgtg

SEQ ID NO: 7723 - DNA, 20 bp, Artificial Sequence
  Synthetic: descartes_3636_KLK1
gcttccggctggggcagcat

SEQ ID NO: 7724 - DNA, 20 bp, Artificial Sequence
  Synthetic: descartes_3637_KLK1
ccaccttccaggtgtccgac

SEQ ID NO: 7725 - DNA, 20 bp, Artificial Sequence
  Synthetic: descartes_3638_KLK1
cactcatcattaggcaggat

SEQ ID NO: 7726 - DNA, 20 bp, Artificial Sequence
  Synthetic: descartes_3639_KLK1
ttcatgtcagtgagagcttc

SEQ ID NO: 7727 - DNA, 20 bp, Artificial Sequence
  Synthetic: descartes_3640_KLK6
cctgacaccatccagtgtgc

SEQ ID NO: 7728 - DNA, 20 bp, Artificial Sequence
  Synthetic: descartes_3641_KLK6
gatccagttcgtgtatctgc

SEQ ID NO: 7729 - DNA, 20 bp, Artificial Sequence
  Synthetic: descartes_3642_KLK6
gctgggcgtgccaggcgcaa

SEQ ID NO: 7730 - DNA, 20 bp, Artificial Sequence
  Synthetic: descartes_3643_KLK6
cagtgggcagctgtgaggac

SEQ ID NO: 7731 - DNA, 20 bp, Artificial Sequence
  Synthetic: descartes_3644_KLK6
ccgaaggttatgcttcccca

SEQ ID NO: 7732 - DNA, 20 bp, Artificial Sequence
  Synthetic: descartes_3645_KLK6
atccacaggggatgttaccc

SEQ ID NO: 7733 - DNA, 20 bp, Artificial Sequence
  Synthetic: descartes_3646_KLRK1
ggaatacagcactccatatt

SEQ ID NO: 7734 - DNA, 20 bp, Artificial Sequence
  Synthetic: descartes_3647_KLRK1
atgagagtaaaaactggtat

SEQ ID NO: 7735 - DNA, 20 bp, Artificial Sequence
  Synthetic: descartes_3648_KLRK1
agacatacaagaagcctggc

SEQ ID NO: 7736 - DNA, 20 bp, Artificial Sequence
  Synthetic: descartes_3649_KLRK1
cttaaactggtgaagtcata

SEQ ID NO: 7737 - DNA, 20 bp, Artificial Sequence
  Synthetic: descartes_3650_KLRK1
ctctcatcaaaaaattggta

SEQ ID NO: 7738 - DNA, 20 bp, Artificial Sequence
  Synthetic: descartes_3651_KLRK1
ttggaatgtgtactagtccc

SEQ ID NO: 7739 - DNA, 20 bp, Artificial Sequence
  Synthetic: descartes_3652_KLRK1
tatatagcctttaaagctcg

SEQ ID NO: 7740 - DNA, 20 bp, Artificial Sequence
  Synthetic: descartes_3653_KLRK1
aacacgatggcaaaagcaaa

SEQ ID NO: 7741 - DNA, 20 bp, Artificial Sequence
  Synthetic: descartes_3654_KMT2A
ggtgagagcccagagtcatc

SEQ ID NO: 7742 - DNA, 20 bp, Artificial Sequence
  Synthetic: descartes_3655_KMT2A
ccccaggctctcagactgaa

SEQ ID NO: 7743 - DNA, 20 bp, Artificial Sequence
  Synthetic: descartes_3656_KMT2A
ggcttaccccactctatgga

SEQ ID NO: 7744 - DNA, 20 bp, Artificial Sequence
  Synthetic: descartes_3657_KMT2A
gcagaagatgaagtggcaac

SEQ ID NO: 7745 - DNA, 20 bp, Artificial Sequence
  Synthetic: descartes_3658_KMT2A
ccaccaaacatcagcaatcc

SEQ ID NO: 7746 - DNA, 20 bp, Artificial Sequence
  Synthetic: descartes_3659_KMT2A
attggagggtcataatcctc

SEQ ID NO: 7747 - DNA, 20 bp, Artificial Sequence
  Synthetic: descartes_3660_KMT2A
gatctagaacgacgaaaaaa

SEQ ID NO: 7748 - DNA, 20 bp, Artificial Sequence
  Synthetic: descartes_3661_KMT2A
gaggggaaaacacagatgga

SEQ ID NO: 7749 - DNA, 20 bp, Artificial Sequence
  Synthetic: descartes_3662_KMT2B
ccccaagcgaagcccacctg

SEQ ID NO: 7750 - DNA, 20 bp, Artificial Sequence
  Synthetic: descartes_3663_KMT2B
gctggacctcactgacccgg

SEQ ID NO: 7751 - DNA, 20 bp, Artificial Sequence
  Synthetic: descartes_3664_KMT2B
gccgtgtgaggatgaaaacc

SEQ ID NO: 7752 - DNA, 20 bp, Artificial Sequence
  Synthetic: descartes_3665_KMT2B
ggggccctaacaccaagaag

SEQ ID NO: 7753 - DNA, 20 bp, Artificial Sequence
  Synthetic: descartes_3666_KMT2B
ccccacggctcccacctcct

SEQ ID NO: 7754 - DNA, 20 bp, Artificial Sequence
  Synthetic: descartes_3667_KMT2B
ggggggtcttcatccataaa

SEQ ID NO: 7755 - DNA, 20 bp, Artificial Sequence
  Synthetic: descartes_3668_KMT2B
gaggaggggaggcccaccgt

SEQ ID NO: 7756 - DNA, 20 bp, Artificial Sequence
  Synthetic: descartes_3669_KMT2B
gcccttgaaacaaacttgat

SEQ ID NO: 7757 - DNA, 20 bp, Artificial Sequence
  Synthetic: descartes_3670_KMT2C
cctgcacaccctgagaaaaa

SEQ ID NO: 7758 - DNA, 20 bp, Artificial Sequence
  Synthetic: descartes_3671_KMT2C
ccctagagactactgtcaca

SEQ ID NO: 7759 - DNA, 20 bp, Artificial Sequence
  Synthetic: descartes_3672_KMT2C
cctggatggcaacccaacag

SEQ ID NO: 7760 - DNA, 20 bp, Artificial Sequence
  Synthetic: descartes_3673_KMT2C
aatgtccccttagggattac

SEQ ID NO: 7761 - DNA, 20 bp, Artificial Sequence
  Synthetic: descartes_3674_KMT2C
gcttctacaccaacagagac

SEQ ID NO: 7762 - DNA, 20 bp, Artificial Sequence
  Synthetic: descartes_3675_KMT2C
gatacagaggatggcaaggt

SEQ ID NO: 7763 - DNA, 20 bp, Artificial Sequence
  Synthetic: descartes_3676_KMT2C
gcttgtgcagttgatgaata

SEQ ID NO: 7764 - DNA, 20 bp, Artificial Sequence
  Synthetic: descartes_3677_KMT2C
ccagcagcacctccagtagc

SEQ ID NO: 7765 - DNA, 20 bp, Artificial Sequence
  Synthetic: descartes_3678_KMT2D
gctgggtcccaacagcagct

SEQ ID NO: 7766 - DNA, 20 bp, Artificial Sequence
  Synthetic: descartes_3679_KMT2D
cctgagggccttacacctgc

SEQ ID NO: 7767 - DNA, 20 bp, Artificial Sequence
  Synthetic: descartes_3680_KMT2D
attggcagccccactacccc

SEQ ID NO: 7768 - DNA, 20 bp, Artificial Sequence
  Synthetic: descartes_3681_KMT2D
tgtcagccacacaccttcga

SEQ ID NO: 7769 - DNA, 20 bp, Artificial Sequence
  Synthetic: descartes_3682_KMT2D
ggctgcccactgtgtgacat

SEQ ID NO: 7770 - DNA, 20 bp, Artificial Sequence
  Synthetic: descartes_3683_KMT2D
tgtgggggaagacctgatac

SEQ ID NO: 7771 - DNA, 20 bp, Artificial Sequence
  Synthetic: descartes_3684_KMT2D
ggcagaaagtatggtatcct

SEQ ID NO: 7772 - DNA, 20 bp, Artificial Sequence
  Synthetic: descartes_3685_KMT2D
gccgggcccgtcctctacca

SEQ ID NO: 7773 - DNA, 20 bp, Artificial Sequence
  Synthetic: descartes_3686_KMT2E
actacaccactaaaaaaacg

SEQ ID NO: 7774 - DNA, 20 bp, Artificial Sequence
  Synthetic: descartes_3687_KMT2E
gatgggagacaaagatcaaa

SEQ ID NO: 7775 - DNA, 20 bp, Artificial Sequence
  Synthetic: descartes_3688_KMT2E
ctcagaaacctccacaccta

SEQ ID NO: 7776 - DNA, 20 bp, Artificial Sequence
  Synthetic: descartes_3689_KMT2E
gagtagaataacacaaaagg

SEQ ID NO: 7777 - DNA, 20 bp, Artificial Sequence
  Synthetic: descartes_3690_KMT2E
actgaactgggtctgcaaga

SEQ ID NO: 7778 - DNA, 20 bp, Artificial Sequence
  Synthetic: descartes_3691_KMT2E
ccaacaccagctacagttta

SEQ ID NO: 7779 - DNA, 20 bp, Artificial Sequence
  Synthetic: descartes_3692_KMT2E
gctgtgctgatcctttccaa

SEQ ID NO: 7780 - DNA, 20 bp, Artificial Sequence
  Synthetic: descartes_3693_KMT2E
gcttctgggcatcataccac

SEQ ID NO: 7781 - DNA, 20 bp, Artificial Sequence
  Synthetic: descartes_3694_KMT5A
ccccttcaggaagagaactc

SEQ ID NO: 7782 - DNA, 20 bp, Artificial Sequence
  Synthetic: descartes_3695_KMT5A
ctgtagattccggctaatgg

SEQ ID NO: 7783 - DNA, 20 bp, Artificial Sequence
  Synthetic: descartes_3696_KMT5A
ctcagatactgaaaatagta

SEQ ID NO: 7784 - DNA, 20 bp, Artificial Sequence
  Synthetic: descartes_3697_KMT5A
gaggttctgctgcttcagat

SEQ ID NO: 7785 - DNA, 20 bp, Artificial Sequence
  Synthetic: descartes_3698_KMT5A
ccgggcagtcaaagatctat

SEQ ID NO: 7786 - DNA, 20 bp, Artificial Sequence
  Synthetic: descartes_3699_KMT5A
gaaaaggtaccaggggacct

SEQ ID NO: 7787 - DNA, 20 bp, Artificial Sequence
  Synthetic: descartes_3700_KMT5A
gtttggaaaaggtaccaggg

SEQ ID NO: 7788 - DNA, 20 bp, Artificial Sequence
  Synthetic: descartes_3701_KMT5A
gtttggcagttcccacattt

SEQ ID NO: 7789 - DNA, 20 bp, Artificial Sequence
  Synthetic: descartes_3702_KMT5B
atgaagcccctctgtataag

SEQ ID NO: 7790 - DNA, 20 bp, Artificial Sequence
  Synthetic: descartes_3703_KMT5B
cttgtggagtacatgacact

SEQ ID NO: 7791 - DNA, 20 bp, Artificial Sequence
  Synthetic: descartes_3704_KMT5B
tccaaagaacccatctccat

SEQ ID NO: 7792 - DNA, 20 bp, Artificial Sequence
  Synthetic: descartes_3705_KMT5B
gacatgcctgtgtcactctt

SEQ ID NO: 7793 - DNA, 20 bp, Artificial Sequence
  Synthetic: descartes_3706_KMT5B
atgggtccccattctgacca

SEQ ID NO: 7794 - DNA, 20 bp, Artificial Sequence
  Synthetic: descartes_3707_KMT5B
actcaggatcaggcagtagt

SEQ ID NO: 7795 - DNA, 20 bp, Artificial Sequence
  Synthetic: descartes_3708_KMT5B
ctgagtggtatctgcatcag

SEQ ID NO: 7796 - DNA, 20 bp, Artificial Sequence
  Synthetic: descartes_3709_KMT5B
tccatgtctaagtagcatgt

SEQ ID NO: 7797 - DNA, 20 bp, Artificial Sequence
  Synthetic: descartes_3710_KMT5C
cgcacccataagatgaacgt

SEQ ID NO: 7798 - DNA, 20 bp, Artificial Sequence
  Synthetic: descartes_3711_KMT5C
ccatcctgccctgcacgcgc

SEQ ID NO: 7799 - DNA, 20 bp, Artificial Sequence
  Synthetic: descartes_3712_KMT5C
ctgaggcagcgggacctgga

SEQ ID NO: 7800 - DNA, 20 bp, Artificial Sequence
  Synthetic: descartes_3713_KMT5C
tgcctgcagatgggaacgca

SEQ ID NO: 7801 - DNA, 20 bp, Artificial Sequence
  Synthetic: descartes_3714_KMT5C
cagcgctgagcgcaggtgct

SEQ ID NO: 7802 - DNA, 20 bp, Artificial Sequence
  Synthetic: descartes_3715_KMT5C
cggcaggaaggcacggaggt

SEQ ID NO: 7803 - DNA, 20 bp, Artificial Sequence
  Synthetic: descartes_3716_KMT5C
cgaaccaggcctagggagcc

SEQ ID NO: 7804 - DNA, 20 bp, Artificial Sequence
  Synthetic: descartes_3717_L3MBTL1
cttcctgaagatgatctgag

SEQ ID NO: 7805 - DNA, 20 bp, Artificial Sequence
  Synthetic: descartes_3718_L3MBTL1
cccgggagccaatccatgtg

SEQ ID NO: 7806 - DNA, 20 bp, Artificial Sequence
  Synthetic: descartes_3719_L3MBTL1
tggatcgacgctgaccaccc

SEQ ID NO: 7807 - DNA, 20 bp, Artificial Sequence
  Synthetic: descartes_3720_L3MBTL1
aggagctcagaagcgctggt

SEQ ID NO: 7808 - DNA, 20 bp, Artificial Sequence
  Synthetic: descartes_3721_L3MBTL1
tgccaccgtcctgccgcagc

SEQ ID NO: 7809 - DNA, 20 bp, Artificial Sequence
  Synthetic: descartes_3722_L3MBTL1
tccgatggtcctccacatcc

SEQ ID NO: 7810 - DNA, 20 bp, Artificial Sequence
  Synthetic: descartes_3723_L3MBTL1
atgggtattctgagtgccat

SEQ ID NO: 7811 - DNA, 20 bp, Artificial Sequence
  Synthetic: descartes_3724_L3MBTL1
atggctggagtcatggctat

SEQ ID NO: 7812 - DNA, 20 bp, Artificial Sequence
  Synthetic: descartes_3725_L3MBTL2
atgaggtagcccttccagtc

SEQ ID NO: 7813 - DNA, 20 bp, Artificial Sequence
  Synthetic: descartes_3726_L3MBTL2
gcagaccaggcagccttgtg

SEQ ID NO: 7814 - DNA, 20 bp, Artificial Sequence
  Synthetic: descartes_3727_L3MBTL2
gcggtgtgagctcaatgtca

SEQ ID NO: 7815 - DNA, 20 bp, Artificial Sequence
  Synthetic: descartes_3728_L3MBTL2
accgtggccacacagatgag

SEQ ID NO: 7816 - DNA, 20 bp, Artificial Sequence
  Synthetic: descartes_3729_L3MBTL2
atcacatcctcccactggtc

SEQ ID NO: 7817 - DNA, 20 bp, Artificial Sequence
  Synthetic: descartes_3730_L3MBTL2
tgcttcacttgactcctcca

SEQ ID NO: 7818 - DNA, 20 bp, Artificial Sequence
  Synthetic: descartes_3731_L3MBTL2
aaagccttcataccgaagca

SEQ ID NO: 7819 - DNA, 20 bp, Artificial Sequence
  Synthetic: descartes_3732_L3MBTL2
aactgggagaactacttgga

SEQ ID NO: 7820 - DNA, 20 bp, Artificial Sequence
  Synthetic: descartes_3733_L3MBTL3
actggatccttcaacctgaa

SEQ ID NO: 7821 - DNA, 20 bp, Artificial Sequence
  Synthetic: descartes_3734_L3MBTL3
aggggaagaagagctttcat

SEQ ID NO: 7822 - DNA, 20 bp, Artificial Sequence
  Synthetic: descartes_3735_L3MBTL3
ctccagaaagacactcatct

SEQ ID NO: 7823 - DNA, 20 bp, Artificial Sequence
  Synthetic: descartes_3736_L3MBTL3
aattccatcctgatgttcaa

SEQ ID NO: 7824 - DNA, 20 bp, Artificial Sequence
  Synthetic: descartes_3737_L3MBTL3
gtacagccgaatcccctcgt

SEQ ID NO: 7825 - DNA, 20 bp, Artificial Sequence
  Synthetic: descartes_3738_L3MBTL3
tacttatgactcaaacagac

SEQ ID NO: 7826 - DNA, 20 bp, Artificial Sequence
  Synthetic: descartes_3739_L3MBTL3
agagaagactgggatgcctt

SEQ ID NO: 7827 - DNA, 20 bp, Artificial Sequence
  Synthetic: descartes_3740_L3MBTL3
aagagagaacagaaagtgaa

SEQ ID NO: 7828 - DNA, 20 bp, Artificial Sequence
  Synthetic: descartes_3741_L3MBTL4
gaatcagactcttcacattc

SEQ ID NO: 7829 - DNA, 20 bp, Artificial Sequence
  Synthetic: descartes_3742_L3MBTL4
gctgcccgtattcagacatg

SEQ ID NO: 7830 - DNA, 20 bp, Artificial Sequence
  Synthetic: descartes_3743_L3MBTL4
agagaacaaacacaggcaaa

SEQ ID NO: 7831 - DNA, 20 bp, Artificial Sequence
  Synthetic: descartes_3744_L3MBTL4
acaccatcctactggatgaa

SEQ ID NO: 7832 - DNA, 20 bp, Artificial Sequence
  Synthetic: descartes_3745_L3MBTL4
aatgtgaagagtctgattcc

SEQ ID NO: 7833 - DNA, 20 bp, Artificial Sequence
  Synthetic: descartes_3746_L3MBTL4
ctggacagaatacctggaag

SEQ ID NO: 7834 - DNA, 20 bp, Artificial Sequence
  Synthetic: descartes_3747_L3MBTL4
agattggaatgagattagaa

SEQ ID NO: 7835 - DNA, 20 bp, Artificial Sequence
  Synthetic: descartes_3748_L3MBTL4
tggttaccgtctaagacttc

SEQ ID NO: 7836 - DNA, 20 bp, Artificial Sequence
  Synthetic: descartes_3749_LAG3
tgtggagctctctggacacc

SEQ ID NO: 7837 - DNA, 20 bp, Artificial Sequence
  Synthetic: descartes_3750_LAG3
tcaggaccttggctggaggc

SEQ ID NO: 7838 - DNA, 20 bp, Artificial Sequence
  Synthetic: descartes_3751_LAG3
tgccttagagcaagggattc

SEQ ID NO: 7839 - DNA, 20 bp, Artificial Sequence
  Synthetic: descartes_3752_LAG3
cccttcgactagaggatgtg

SEQ ID NO: 7840 - DNA, 20 bp, Artificial Sequence
  Synthetic: descartes_3753_LAG3
tgaggtgactccagtatctg

SEQ ID NO: 7841 - DNA, 20 bp, Artificial Sequence
  Synthetic: descartes_3754_LAG3
ctcactgccaagtggactcc

SEQ ID NO: 7842 - DNA, 20 bp, Artificial Sequence
  Synthetic: descartes_3755_LAG3
gtgactggagcctttggctt

SEQ ID NO: 7843 - DNA, 20 bp, Artificial Sequence
  Synthetic: descartes_3756_LAG3
gctttcacctttggagaaga

SEQ ID NO: 7844 - DNA, 20 bp, Artificial Sequence
  Synthetic: descartes_3757_LAIR1
gggggcttataatagatgca

SEQ ID NO: 7845 - DNA, 20 bp, Artificial Sequence
  Synthetic: descartes_3758_LAIR1
accagcagctccaggtagtc

SEQ ID NO: 7846 - DNA, 20 bp, Artificial Sequence
  Synthetic: descartes_3759_LAIR1
cttctcttactgagtcaatg

SEQ ID NO: 7847 - DNA, 20 bp, Artificial Sequence
  Synthetic: descartes_3760_LAIR1
aaccccaaccgggccccggc

SEQ ID NO: 7848 - DNA, 20 bp, Artificial Sequence
  Synthetic: descartes_3761_LAIR1
gtgtgccggggcccggttgg

SEQ ID NO: 7849 - DNA, 20 bp, Artificial Sequence
  Synthetic: descartes_3762_LAIR1
tcgctgcatctattataagc

SEQ ID NO: 7850 - DNA, 20 bp, Artificial Sequence
  Synthetic: descartes_3763_LAIR1
tggactgtggggacacagcc

SEQ ID NO: 7851 - DNA, 20 bp, Artificial Sequence
  Synthetic: descartes_3764_LAIR1
tctgattctggcgatggagg

SEQ ID NO: 7852 - DNA, 20 bp, Artificial Sequence
  Synthetic: descartes_3765_LAMP3
tagacacccatacccataag

SEQ ID NO: 7853 - DNA, 20 bp, Artificial Sequence
  Synthetic: descartes_3766_LAMP3
acctcggagatacttcaaca

SEQ ID NO: 7854 - DNA, 20 bp, Artificial Sequence
  Synthetic: descartes_3767_LAMP3
gggtgccacagttcccagag

SEQ ID NO: 7855 - DNA, 20 bp, Artificial Sequence
  Synthetic: descartes_3768_LAMP3
gaacctgataaattccagtc

SEQ ID NO: 7856 - DNA, 20 bp, Artificial Sequence
  Synthetic: descartes_3769_LAMP3
aaaggtgatatgaccatcca

SEQ ID NO: 7857 - DNA, 20 bp, Artificial Sequence
  Synthetic: descartes_3770_LAMP3
tcgatagcactgcacaaaag

SEQ ID NO: 7858 - DNA, 20 bp, Artificial Sequence
  Synthetic: descartes_3771_LAMP3
gtgaggtgcttgcttagctg

SEQ ID NO: 7859 - DNA, 20 bp, Artificial Sequence
  Synthetic: descartes_3772_LAMP3
tgtcctgtactgttgctgct

SEQ ID NO: 7860 - DNA, 20 bp, Artificial Sequence
  Synthetic: descartes_3773_LAX1
gtagaagctagagtctcagc

SEQ ID NO: 7861 - DNA, 20 bp, Artificial Sequence
  Synthetic: descartes_3774_LAX1
agtgctgcagagactatgaa

SEQ ID NO: 7862 - DNA, 20 bp, Artificial Sequence
  Synthetic: descartes_3775_LAX1
atagtctctgcagcactgaa

SEQ ID NO: 7863 - DNA, 20 bp, Artificial Sequence
  Synthetic: descartes_3776_LAX1
atagtcactggagtcctcat

SEQ ID NO: 7864 - DNA, 20 bp, Artificial Sequence
  Synthetic: descartes_3777_LAX1
agtactgagagcctcctctc

SEQ ID NO: 7865 - DNA, 20 bp, Artificial Sequence
  Synthetic: descartes_3778_LAX1
atctgactgtcctcactctg

SEQ ID NO: 7866 - DNA, 20 bp, Artificial Sequence
  Synthetic: descartes_3779_LAX1
tggagaggaggctctcagta

SEQ ID NO: 7867 - DNA, 20 bp, Artificial Sequence
  Synthetic: descartes_3780_LAX1
ccacaaaccagacaaagagc

SEQ ID NO: 7868 - DNA, 20 bp, Artificial Sequence
  Synthetic: descartes_3781_LBR
acttccacttccctccttgc

SEQ ID NO: 7869 - DNA, 20 bp, Artificial Sequence
  Synthetic: descartes_3782_LBR
tcctgacatctgcagtcatc

SEQ ID NO: 7870 - DNA, 20 bp, Artificial Sequence
  Synthetic: descartes_3783_LBR
gaaatagcatcagcagatat

SEQ ID NO: 7871 - DNA, 20 bp, Artificial Sequence
  Synthetic: descartes_3784_LBR
ccataactcatacaaagctg

SEQ ID NO: 7872 - DNA, 20 bp, Artificial Sequence
  Synthetic: descartes_3785_LBR
agccaaaagcatcaccaagt

SEQ ID NO: 7873 - DNA, 20 bp, Artificial Sequence
  Synthetic: descartes_3786_LBR
gctgaaatgaaaatacagga

SEQ ID NO: 7874 - DNA, 20 bp, Artificial Sequence
  Synthetic: descartes_3787_LBR
atttcagccaaaagcatcac

SEQ ID NO: 7875 - DNA, 20 bp, Artificial Sequence
  Synthetic: descartes_3788_LBR
cctcctcctttgccagcttt

SEQ ID NO: 7876 - DNA, 20 bp, Artificial Sequence
  Synthetic: descartes_3789_LCK
tcaagaccccttcaggcatc

SEQ ID NO: 7877 - DNA, 20 bp, Artificial Sequence
  Synthetic: descartes_3790_LCK
ccattaagtggacagcgcca

SEQ ID NO: 7878 - DNA, 20 bp, Artificial Sequence
  Synthetic: descartes_3791_LCK
ggatcctgctgacggaaatt

SEQ ID NO: 7879 - DNA, 20 bp, Artificial Sequence
  Synthetic: descartes_3792_LCK
cgtcagcaggatcccaaaag

SEQ ID NO: 7880 - DNA, 20 bp, Artificial Sequence
  Synthetic: descartes_3793_LCK
actgtcggtccgggacttcg

SEQ ID NO: 7881 - DNA, 20 bp, Artificial Sequence
  Synthetic: descartes_3794_LCK
accacctctccctggttctg

SEQ ID NO: 7882 - DNA, 20 bp, Artificial Sequence
  Synthetic: descartes_3795_LCK
gcctagcacgcctcattgag

SEQ ID NO: 7883 - DNA, 20 bp, Artificial Sequence
  Synthetic: descartes_3796_LCK
ccggcctgcatgaactggtc

SEQ ID NO: 7884 - DNA, 20 bp, Artificial Sequence
  Synthetic: descartes_3797_LCP2
caacatccagatccgttatc

SEQ ID NO: 7885 - DNA, 20 bp, Artificial Sequence
  Synthetic: descartes_3798_LCP2
ccttcaagatctactaagcc

SEQ ID NO: 7886 - DNA, 20 bp, Artificial Sequence
  Synthetic: descartes_3799_LCP2
ctgaagtagtcaataatatc

SEQ ID NO: 7887 - DNA, 20 bp, Artificial Sequence
  Synthetic: descartes_3800_LCP2
gagctgtctctgaccagaaa

SEQ ID NO: 7888 - DNA, 20 bp, Artificial Sequence
  Synthetic: descartes_3801_LCP2
tggtcagagacagctctaaa

SEQ ID NO: 7889 - DNA, 20 bp, Artificial Sequence
  Synthetic: descartes_3802_LCP2
cctcggagtccagttcccaa

SEQ ID NO: 7890 - DNA, 20 bp, Artificial Sequence
  Synthetic: descartes_3803_LCP2
ccatcaatgagcagaagtgg

SEQ ID NO: 7891 - DNA, 20 bp, Artificial Sequence
  Synthetic: descartes_3804_LCP2
ccccagccagcactacttcc

SEQ ID NO: 7892 - DNA, 20 bp, Artificial Sequence
  Synthetic: descartes_3805_LEF1
gctgacatcaagtcttcctt

SEQ ID NO: 7893 - DNA, 20 bp, Artificial Sequence
  Synthetic: descartes_3806_LEF1
gagtacactcagcaacgaca

SEQ ID NO: 7894 - DNA, 20 bp, Artificial Sequence
  Synthetic: descartes_3807_LEF1
acctgaggtgttacaatagc

SEQ ID NO: 7895 - DNA, 20 bp, Artificial Sequence
  Synthetic: descartes_3808_LEF1
ccatcatatgattcccggtc

SEQ ID NO: 7896 - DNA, 20 bp, Artificial Sequence
  Synthetic: descartes_3809_LEF1
tccaggatcacacccgtcac

SEQ ID NO: 7897 - DNA, 20 bp, Artificial Sequence
  Synthetic: descartes_3810_LEF1
atgtataacataaaagcatt

SEQ ID NO: 7898 - DNA, 20 bp, Artificial Sequence
  Synthetic: descartes_3811_LEF1
tgttatacatgaaagaaatg

SEQ ID NO: 7899 - DNA, 20 bp, Artificial Sequence
  Synthetic: descartes_3812_LEF1
gcatcattatgtacccggaa

SEQ ID NO: 7900 - DNA, 20 bp, Artificial Sequence
  Synthetic: descartes_3813_LEP
gatgggcacagcttggacat

SEQ ID NO: 7901 - DNA, 20 bp, Artificial Sequence
  Synthetic: descartes_3814_LEP
tggaaggcatactggtgagg

SEQ ID NO: 7902 - DNA, 20 bp, Artificial Sequence
  Synthetic: descartes_3815_LEP
tatgtccaagctgtgcccat

SEQ ID NO: 7903 - DNA, 20 bp, Artificial Sequence
  Synthetic: descartes_3816_LEP
gacttcattcctgggctcca

SEQ ID NO: 7904 - DNA, 20 bp, Artificial Sequence
  Synthetic: descartes_3817_LEP
gatcacgtttctggaaggca

SEQ ID NO: 7905 - DNA, 20 bp, Artificial Sequence
  Synthetic: descartes_3818_LEP
gccctatcttttctatgtcc

SEQ ID NO: 7906 - DNA, 20 bp, Artificial Sequence
  Synthetic: descartes_3819_LEP
gtgtcatcttggactttttg

SEQ ID NO: 7907 - DNA, 20 bp, Artificial Sequence
  Synthetic: descartes_3820_LGALS3
ggtttccagacccagataac

SEQ ID NO: 7908 - DNA, 20 bp, Artificial Sequence
  Synthetic: descartes_3821_LGALS3
acccgatgattgtactgcaa

SEQ ID NO: 7909 - DNA, 20 bp, Artificial Sequence
  Synthetic: descartes_3822_LGALS3
tggtgacatagacctcacca

SEQ ID NO: 7910 - DNA, 20 bp, Artificial Sequence
  Synthetic: descartes_3823_LGALS3
cagacccagataacgcatca

SEQ ID NO: 7911 - DNA, 20 bp, Artificial Sequence
  Synthetic: descartes_3824_LGALS3
acccacgcttcaatgagaac

SEQ ID NO: 7912 - DNA, 20 bp, Artificial Sequence
  Synthetic: descartes_3825_LGALS3
aaatgggaaaaccgactgtc

SEQ ID NO: 7913 - DNA, 20 bp, Artificial Sequence
  Synthetic: descartes_3826_LGALS3
caaagagggaatgatgttgc

SEQ ID NO: 7914 - DNA, 20 bp, Artificial Sequence
  Synthetic: descartes_3827_LGALS3
ccatttgaaagtgggaaacc

SEQ ID NO: 7915 - DNA, 20 bp, Artificial Sequence
  Synthetic: descartes_3828_LGALS9
ggggcagacttcgctcctca

SEQ ID NO: 7916 - DNA, 20 bp, Artificial Sequence
  Synthetic: descartes_3829_LGALS9
atgagaatgctgtggtccgc

SEQ ID NO: 7917 - DNA, 20 bp, Artificial Sequence
  Synthetic: descartes_3830_LGALS9
cactgaagccagtctgaaag

SEQ ID NO: 7918 - DNA, 20 bp, Artificial Sequence
  Synthetic: descartes_3831_LGALS9
ctgtgaactttcagactggc

SEQ ID NO: 7919 - DNA, 20 bp, Artificial Sequence
  Synthetic: descartes_3832_LGALS9
agactggcttcagtggaaat

SEQ ID NO: 7920 - DNA, 20 bp, Artificial Sequence
  Synthetic: descartes_3833_LGALS9
aatactaccatcgcctgagg

SEQ ID NO: 7921 - DNA, 20 bp, Artificial Sequence
  Synthetic: descartes_3834_LGALS9
aagatggagggtacgtggtg

SEQ ID NO: 7922 - DNA, 20 bp, Artificial Sequence
  Synthetic: descartes_3835_LGALS9
tctgcgccccctgggcctgg

SEQ ID NO: 7923 - DNA, 20 bp, Artificial Sequence
  Synthetic: descartes_3836_LIG4
gctgagggagtgtctcatgt

SEQ ID NO: 7924 - DNA, 20 bp, Artificial Sequence
  Synthetic: descartes_3837_LIG4
tgtggaacagagaagccaga

SEQ ID NO: 7925 - DNA, 20 bp, Artificial Sequence
  Synthetic: descartes_3838_LIG4
aatgcagaaaataaagtgat

SEQ ID NO: 7926 - DNA, 20 bp, Artificial Sequence
  Synthetic: descartes_3839_LIG4
atagaaaagctccaccaagc

SEQ ID NO: 7927 - DNA, 20 bp, Artificial Sequence
  Synthetic: descartes_3840_LIG4
cctagagatggaaaagatgc

SEQ ID NO: 7928 - DNA, 20 bp, Artificial Sequence
  Synthetic: descartes_3841_LIG4
gatgcgagcttaccagatgc

SEQ ID NO: 7929 - DNA, 20 bp, Artificial Sequence
  Synthetic: descartes_3842_LIG4
gactcaattgccagcaataa

SEQ ID NO: 7930 - DNA, 20 bp, Artificial Sequence
  Synthetic: descartes_3843_LIG4
accatacagcaagtaaacga

SEQ ID NO: 7931 - DNA, 20 bp, Artificial Sequence
  Synthetic: descartes_3844_LILRA1
tctatacagacggtactcct

SEQ ID NO: 7932 - DNA, 20 bp, Artificial Sequence
  Synthetic: descartes_3845_LILRA1
tgatgtcagctacgacagat

SEQ ID NO: 7933 - DNA, 20 bp, Artificial Sequence
  Synthetic: descartes_3846_LILRA1
taagaagccatcactctcag

SEQ ID NO: 7934 - DNA, 20 bp, Artificial Sequence
  Synthetic: descartes_3847_LILRA1
tacggtagccacactgcagg

SEQ ID NO: 7935 - DNA, 20 bp, Artificial Sequence
  Synthetic: descartes_3848_LILRA1
aggctcagcacagccagaga

SEQ ID NO: 7936 - DNA, 20 bp, Artificial Sequence
  Synthetic: descartes_3849_LILRA1
gcagcttcattctgtgtaag

SEQ ID NO: 7937 - DNA, 20 bp, Artificial Sequence
  Synthetic: descartes_3850_LILRA1
tgatgggctgagggtgttag

SEQ ID NO: 7938 - DNA, 20 bp, Artificial Sequence
  Synthetic: descartes_3851_LILRA1
cttctgaccaaggcgggagc

SEQ ID NO: 7939 - DNA, 20 bp, Artificial Sequence
  Synthetic: descartes_3852_LILRA6
tgtcccagggctctgggctt

SEQ ID NO: 7940 - DNA, 20 bp, Artificial Sequence
  Synthetic: descartes_3853_LILRA6
tccagtcggtactcctgggc

SEQ ID NO: 7941 - DNA, 20 bp, Artificial Sequence
  Synthetic: descartes_3854_LILRA6
ttctgtataaggagggggaa

SEQ ID NO: 7942 - DNA, 20 bp, Artificial Sequence
  Synthetic: descartes_3855_LILRA6
ttctgatgaaggaaggagaa

SEQ ID NO: 7943 - DNA, 20 bp, Artificial Sequence
  Synthetic: descartes_3856_LILRA6
acactttccttctgaccaaa

SEQ ID NO: 7944 - DNA, 20 bp, Artificial Sequence
  Synthetic: descartes_3857_LILRA6
cttctgaccaaagaaggggc

SEQ ID NO: 7945 - DNA, 20 bp, Artificial Sequence
  Synthetic: descartes_3858_LILRA6
gtcagaaggaaagtgtcaaa

SEQ ID NO: 7946 - DNA, 20 bp, Artificial Sequence
  Synthetic: descartes_3859_LILRA6
cccagtgagcccctggaact

SEQ ID NO: 7947 - DNA, 20 bp, Artificial Sequence
  Synthetic: descartes_3860_LILRB1
tctatatagacggtactcct

SEQ ID NO: 7948 - DNA, 20 bp, Artificial Sequence
  Synthetic: descartes_3861_LILRB1
taagaagccatcactctcag

SEQ ID NO: 7949 - DNA, 20 bp, Artificial Sequence
  Synthetic: descartes_3862_LILRB1
ccctgacgtcgatgtcggag

SEQ ID NO: 7950 - DNA, 20 bp, Artificial Sequence
  Synthetic: descartes_3863_LILRB1
atggcttcattctgtgtaag

SEQ ID NO: 7951 - DNA, 20 bp, Artificial Sequence
  Synthetic: descartes_3864_LILRB1
caacatcctgcaggggctgt

SEQ ID NO: 7952 - DNA, 20 bp, Artificial Sequence
  Synthetic: descartes_3865_LILRB1
ttctgtataaggacggggaa

SEQ ID NO: 7953 - DNA, 20 bp, Artificial Sequence
  Synthetic: descartes_3866_LILRB1
ttcctgggcatcggcagctg

SEQ ID NO: 7954 - DNA, 20 bp, Artificial Sequence
  Synthetic: descartes_3867_LILRB1
ttttctctatatagacggta

SEQ ID NO: 7955 - DNA, 20 bp, Artificial Sequence
  Synthetic: descartes_3868_LILRB2
tccctatatagacggtactc

SEQ ID NO: 7956 - DNA, 20 bp, Artificial Sequence
  Synthetic: descartes_3869_LILRB2
taagaagccatcactctcag

SEQ ID NO: 7957 - DNA, 20 bp, Artificial Sequence
  Synthetic: descartes_3870_LILRB2
cccaggggccatgacaggac

SEQ ID NO: 7958 - DNA, 20 bp, Artificial Sequence
  Synthetic: descartes_3871_LILRB2
ccctgacgtcgatgtcggag

SEQ ID NO: 7959 - DNA, 20 bp, Artificial Sequence
  Synthetic: descartes_3872_LILRB2
caacatcctgcaggggctgt

SEQ ID NO: 7960 - DNA, 20 bp, Artificial Sequence
  Synthetic: descartes_3873_LILRB2
gggatccgacccagtggggg

SEQ ID NO: 7961 - DNA, 20 bp, Artificial Sequence
  Synthetic: descartes_3874_LILRB2
ttctgtacaaggagggggaa

SEQ ID NO: 7962 - DNA, 20 bp, Artificial Sequence
  Synthetic: descartes_3875_LILRB2
ttcctgggcgtcggcagctg

SEQ ID NO: 7963 - DNA, 20 bp, Artificial Sequence
  Synthetic: descartes_3876_LILRB3
acactttccttctgaccaaa

SEQ ID NO: 7964 - DNA, 20 bp, Artificial Sequence
  Synthetic: descartes_3877_LILRB3
cttctgaccaaagaaggggc

SEQ ID NO: 7965 - DNA, 20 bp, Artificial Sequence
  Synthetic: descartes_3878_LILRB3
gtcagaaggaaagtgtcaaa

SEQ ID NO: 7966 - DNA, 20 bp, Artificial Sequence
  Synthetic: descartes_3879_LILRB3
cccagtgagcccctggaact

SEQ ID NO: 7967 - DNA, 20 bp, Artificial Sequence
  Synthetic: descartes_3880_LILRB3
ttctgtataaggagggggaa

SEQ ID NO: 7968 - DNA, 20 bp, Artificial Sequence
  Synthetic: descartes_3881_LILRB3
attggggtctcggtggcctt

SEQ ID NO: 7969 - DNA, 20 bp, Artificial Sequence
  Synthetic: descartes_3882_LILRB3
ctgtgacgctgacggaggag

SEQ ID NO: 7970 - DNA, 20 bp, Artificial Sequence
  Synthetic: descartes_3883_LILRB3
accggggcatacgtcactgc

SEQ ID NO: 7971 - DNA, 20 bp, Artificial Sequence
  Synthetic: descartes_3884_LILRB4
ccctcagacagaaggcaact

SEQ ID NO: 7972 - DNA, 20 bp, Artificial Sequence
  Synthetic: descartes_3885_LILRB4
accttggcatacgtcactgc

SEQ ID NO: 7973 - DNA, 20 bp, Artificial Sequence
  Synthetic: descartes_3886_LILRB4
tctcctaggtctggagtgtt

SEQ ID NO: 7974 - DNA, 20 bp, Artificial Sequence
  Synthetic: descartes_3887_LILRB4
tgtccaggaattccccagac

SEQ ID NO: 7975 - DNA, 20 bp, Artificial Sequence
  Synthetic: descartes_3888_LILRB4
tccctggacgtcagcagctg

SEQ ID NO: 7976 - DNA, 20 bp, Artificial Sequence
  Synthetic: descartes_3889_LILRB4
caccccgtcctcaggctgtg

SEQ ID NO: 7977 - DNA, 20 bp, Artificial Sequence
  Synthetic: descartes_3890_LILRB4
tccagacggtactcccgagc

SEQ ID NO: 7978 - DNA, 20 bp, Artificial Sequence
  Synthetic: descartes_3891_LILRB4
ctctttatccagacggtact

SEQ ID NO: 7979 - DNA, 20 bp, Artificial Sequence
  Synthetic: descartes_3892_LILRB5
ctctgatgccgatgtcggag

SEQ ID NO: 7980 - DNA, 20 bp, Artificial Sequence
  Synthetic: descartes_3893_LILRB5
ctgtaatagtaatagcatct

SEQ ID NO: 7981 - DNA, 20 bp, Artificial Sequence
  Synthetic: descartes_3894_LILRB5
gccctgccgagtcctgtggt

SEQ ID NO: 7982 - DNA, 20 bp, Artificial Sequence
  Synthetic: descartes_3895_LILRB5
ctcctgaggccaccacagga

SEQ ID NO: 7983 - DNA, 20 bp, Artificial Sequence
  Synthetic: descartes_3896_LILRB5
ctcctggatgtcagcaactg

SEQ ID NO: 7984 - DNA, 20 bp, Artificial Sequence
  Synthetic: descartes_3897_LILRB5
ctgggatggaggaggctcag

SEQ ID NO: 7985 - DNA, 20 bp, Artificial Sequence
  Synthetic: descartes_3898_LILRB5
accaaggagggggcagccca

SEQ ID NO: 7986 - DNA, 20 bp, Artificial Sequence
  Synthetic: descartes_3899_LILRB5
gggagcttctgtgagtacag

SEQ ID NO: 7987 - DNA, 20 bp, Artificial Sequence
  Synthetic: descartes_3900_LOXL3
gctggggaagcccagcatcc

SEQ ID NO: 7988 - DNA, 20 bp, Artificial Sequence
  Synthetic: descartes_3901_LOXL3
gggtgaggatatcatagtga

SEQ ID NO: 7989 - DNA, 20 bp, Artificial Sequence
  Synthetic: descartes_3902_LOXL3
ccaacaatgcaatgaaatgt

SEQ ID NO: 7990 - DNA, 20 bp, Artificial Sequence
  Synthetic: descartes_3903_LOXL3
aacgctaccctggccagacc

SEQ ID NO: 7991 - DNA, 20 bp, Artificial Sequence
  Synthetic: descartes_3904_LOXL3
cagatgaccccagcatcctc

SEQ ID NO: 7992 - DNA, 20 bp, Artificial Sequence
  Synthetic: descartes_3905_LOXL3
tgtctcgaagacactgagtg

SEQ ID NO: 7993 - DNA, 20 bp, Artificial Sequence
  Synthetic: descartes_3906_LOXL3
attgcattgttggtaaagtc

SEQ ID NO: 7994 - DNA, 20 bp, Artificial Sequence
  Synthetic: descartes_3907_LOXL3
ctggcttcacatccgtgatg

SEQ ID NO: 7995 - DNA, 20 bp, Artificial Sequence
  Synthetic: descartes_3908_LRRC32
gcaggtccagcacctccagt

SEQ ID NO: 7996 - DNA, 20 bp, Artificial Sequence
  Synthetic: descartes_3909_LRRC32
tgctgaggttcaggaagcac

SEQ ID NO: 7997 - DNA, 20 bp, Artificial Sequence
  Synthetic: descartes_3910_LRRC32
cccgacctggccgcgctccc

SEQ ID NO: 7998 - DNA, 20 bp, Artificial Sequence
  Synthetic: descartes_3911_LRRC32
agctacaatgagattgagct

SEQ ID NO: 7999 - DNA, 20 bp, Artificial Sequence
  Synthetic: descartes_3912_LRRC32
ccagctcttgaatctggatt

SEQ ID NO: 8000 - DNA, 20 bp, Artificial Sequence
  Synthetic: descartes_3913_LRRC32
ttgagcacctgacctccctg

SEQ ID NO: 8001 - DNA, 20 bp, Artificial Sequence
  Synthetic: descartes_3914_LRRC32
agacggcctcccagccccag

SEQ ID NO: 8002 - DNA, 20 bp, Artificial Sequence
  Synthetic: descartes_3915_LRRC32
ttctcccgcaggtcaagcca

SEQ ID NO: 8003 - DNA, 20 bp, Artificial Sequence
  Synthetic: descartes_3916_LTA
tccttgagcaacaattctct

SEQ ID NO: 8004 - DNA, 20 bp, Artificial Sequence
  Synthetic: descartes_3917_LTA
ctctccagagcagtgagttc

SEQ ID NO: 8005 - DNA, 20 bp, Artificial Sequence
  Synthetic: descartes_3918_LTA
ccagagaagaccacctggga

SEQ ID NO: 8006 - DNA, 20 bp, Artificial Sequence
  Synthetic: descartes_3919_LTA
agggtgctgtgggcaagatg

SEQ ID NO: 8007 - DNA, 20 bp, Artificial Sequence
  Synthetic: descartes_3920_LY75
ggtgaagatcagcaacaaac

SEQ ID NO: 8008 - DNA, 20 bp, Artificial Sequence
  Synthetic: descartes_3921_LY75
ccatctgaccaaccaaagtt

SEQ ID NO: 8009 - DNA, 20 bp, Artificial Sequence
  Synthetic: descartes_3922_LY75
ataagaccccactgtcatat

SEQ ID NO: 8010 - DNA, 20 bp, Artificial Sequence
  Synthetic: descartes_3923_LY75
gcatgtgccttatcccagga

SEQ ID NO: 8011 - DNA, 20 bp, Artificial Sequence
  Synthetic: descartes_3924_LY75
atctcgaatactcagaatat

SEQ ID NO: 8012 - DNA, 20 bp, Artificial Sequence
  Synthetic: descartes_3925_LY75
ccagcagatagcaaaatcca

SEQ ID NO: 8013 - DNA, 20 bp, Artificial Sequence
  Synthetic: descartes_3926_LY75
gttgtgaacgcttgccaagt

SEQ ID NO: 8014 - DNA, 20 bp, Artificial Sequence
  Synthetic: descartes_3927_LY75
gctgcagaatctgggctgta

SEQ ID NO: 8015 - DNA, 20 bp, Artificial Sequence
  Synthetic: descartes_3928_LY9
ggaccaatccagatgacgtt

SEQ ID NO: 8016 - DNA, 20 bp, Artificial Sequence
  Synthetic: descartes_3929_LY9
gggggagagtcacggaaccc

SEQ ID NO: 8017 - DNA, 20 bp, Artificial Sequence
  Synthetic: descartes_3930_LY9
aagtcaccactgaggaggaa

SEQ ID NO: 8018 - DNA, 20 bp, Artificial Sequence
  Synthetic: descartes_3931_LY9
cgtatggagcagtagattgt

SEQ ID NO: 8019 - DNA, 20 bp, Artificial Sequence
  Synthetic: descartes_3932_LY9
gcacgtcccaaagaaaatgt

SEQ ID NO: 8020 - DNA, 20 bp, Artificial Sequence
  Synthetic: descartes_3933_LY9
tctgcccccttcacggagca

SEQ ID NO: 8021 - DNA, 20 bp, Artificial Sequence
  Synthetic: descartes_3934_LY9
gcttccaaatgcaccagctg

SEQ ID NO: 8022 - DNA, 20 bp, Artificial Sequence
  Synthetic: descartes_3935_LY9
actgcttctccatgagacat

SEQ ID NO: 8023 - DNA, 20 bp, Artificial Sequence
  Synthetic: descartes_3936_LYN
cctggacagaggtttcaaac

SEQ ID NO: 8024 - DNA, 20 bp, Artificial Sequence
  Synthetic: descartes_3937_LYN
cctgtatcagcgacatgatt

SEQ ID NO: 8025 - DNA, 20 bp, Artificial Sequence
  Synthetic: descartes_3938_LYN
gtataggaggattccaaagg

SEQ ID NO: 8026 - DNA, 20 bp, Artificial Sequence
  Synthetic: descartes_3939_LYN
gccttgctagagtaattgaa

SEQ ID NO: 8027 - DNA, 20 bp, Artificial Sequence
  Synthetic: descartes_3940_LYN
acagccaccttggtactgtt

SEQ ID NO: 8028 - DNA, 20 bp, Artificial Sequence
  Synthetic: descartes_3941_LYN
tgtgagagatccaacgtcca

SEQ ID NO: 8029 - DNA, 20 bp, Artificial Sequence
  Synthetic: descartes_3942_LYN
ataatgtcatagagctcatc

SEQ ID NO: 8030 - DNA, 20 bp, Artificial Sequence
  Synthetic: descartes_3943_LYN
aaggatataaccaggaagga

SEQ ID NO: 8031 - DNA, 20 bp, Artificial Sequence
  Synthetic: descartes_3944_MAD1L1
ctcctccagccgactccgct

SEQ ID NO: 8032 - DNA, 20 bp, Artificial Sequence
  Synthetic: descartes_3945_MAD1L1
gtcctgctctggtcatagtc

SEQ ID NO: 8033 - DNA, 20 bp, Artificial Sequence
  Synthetic: descartes_3946_MAD1L1
cagaccaagatccaggagtt

SEQ ID NO: 8034 - DNA, 20 bp, Artificial Sequence
  Synthetic: descartes_3947_MAD1L1
tcccgctccacctggatgag

SEQ ID NO: 8035 - DNA, 20 bp, Artificial Sequence
  Synthetic: descartes_3948_MAD1L1
tccaccctgagatctttgaa

SEQ ID NO: 8036 - DNA, 20 bp, Artificial Sequence
  Synthetic: descartes_3949_MAD1L1
tacctcggccccaggttctc

SEQ ID NO: 8037 - DNA, 20 bp, Artificial Sequence
  Synthetic: descartes_3950_MAD1L1
tggcctcccagctcctccag

SEQ ID NO: 8038 - DNA, 20 bp, Artificial Sequence
  Synthetic: descartes_3951_MAD1L1
tcacgcagcctcttgctggc

SEQ ID NO: 8039 - DNA, 20 bp, Artificial Sequence
  Synthetic: descartes_3952_MAD2L2
gtggtatcagccgggggtca

SEQ ID NO: 8040 - DNA, 20 bp, Artificial Sequence
  Synthetic: descartes_3953_MAD2L2
cgtggaagagcgcgctcata

SEQ ID NO: 8041 - DNA, 20 bp, Artificial Sequence
  Synthetic: descartes_3954_MAD2L2
gataaagagcaccgcccagt

SEQ ID NO: 8042 - DNA, 20 bp, Artificial Sequence
  Synthetic: descartes_3955_MAD2L2
ccctggatcctggcggatga

SEQ ID NO: 8043 - DNA, 20 bp, Artificial Sequence
  Synthetic: descartes_3956_MAD2L2
agatcacccagcctccactg

SEQ ID NO: 8044 - DNA, 20 bp, Artificial Sequence
  Synthetic: descartes_3957_MAD2L2
tccaaaatcaccaccaccac

SEQ ID NO: 8045 - DNA, 20 bp, Artificial Sequence
  Synthetic: descartes_3958_MAD2L2
tggaagatgcccacggggta

SEQ ID NO: 8046 - DNA, 20 bp, Artificial Sequence
  Synthetic: descartes_3959_MAD2L2
aaatgtccgacgtcatggtt

SEQ ID NO: 8047 - DNA, 20 bp, Artificial Sequence
  Synthetic: descartes_3960_MALT1
gtagaagtaatgtgccagta

SEQ ID NO: 8048 - DNA, 20 bp, Artificial Sequence
  Synthetic: descartes_3961_MALT1
catgcactgcattaaaaata

SEQ ID NO: 8049 - DNA, 20 bp, Artificial Sequence
  Synthetic: descartes_3962_MALT1
ataaccatgtcctgcataat

SEQ ID NO: 8050 - DNA, 20 bp, Artificial Sequence
  Synthetic: descartes_3963_MALT1
cagtgaactgagtctggtat

SEQ ID NO: 8051 - DNA, 20 bp, Artificial Sequence
  Synthetic: descartes_3964_MALT1
gtggatgtgtacgaattgac

SEQ ID NO: 8052 - DNA, 20 bp, Artificial Sequence
  Synthetic: descartes_3965_MALT1
ctacacatatccaataagaa

SEQ ID NO: 8053 - DNA, 20 bp, Artificial Sequence
  Synthetic: descartes_3966_MALT1
actgttggatcttactgaat

SEQ ID NO: 8054 - DNA, 20 bp, Artificial Sequence
  Synthetic: descartes_3967_MALT1
gtctcatgtgttaatggtaa

SEQ ID NO: 8055 - DNA, 20 bp, Artificial Sequence
  Synthetic: descartes_3968_MAN2B1
gttgtgaaggaccccaatgg

SEQ ID NO: 8056 - DNA, 20 bp, Artificial Sequence
  Synthetic: descartes_3969_MAN2B1
ccaacagctaaacatcagca

SEQ ID NO: 8057 - DNA, 20 bp, Artificial Sequence
  Synthetic: descartes_3970_MAN2B1
gctgttggcaaaaggtgaag

SEQ ID NO: 8058 - DNA, 20 bp, Artificial Sequence
  Synthetic: descartes_3971_MAN2B1
gttgtcacctatactggcgt

SEQ ID NO: 8059 - DNA, 20 bp, Artificial Sequence
  Synthetic: descartes_3972_MAN2B1
ggaagtaatcgaccagctcc

SEQ ID NO: 8060 - DNA, 20 bp, Artificial Sequence
  Synthetic: descartes_3973_MAN2B1
cgtggagattgccttcttct

SEQ ID NO: 8061 - DNA, 20 bp, Artificial Sequence
  Synthetic: descartes_3974_MAN2B1
ccagccggatgagcttgtca

SEQ ID NO: 8062 - DNA, 20 bp, Artificial Sequence
  Synthetic: descartes_3975_MAN2B1
ccgtaggagaggattccgga

SEQ ID NO: 8063 - DNA, 20 bp, Artificial Sequence
  Synthetic: descartes_3976_MANSC1
ctctgatcaagaaatagctc

SEQ ID NO: 8064 - DNA, 20 bp, Artificial Sequence
  Synthetic: descartes_3977_MANSC1
gagtgtcgaagatcatcaag

SEQ ID NO: 8065 - DNA, 20 bp, Artificial Sequence
  Synthetic: descartes_3978_MANSC1
cagaaatctccaacctaact

SEQ ID NO: 8066 - DNA, 20 bp, Artificial Sequence
  Synthetic: descartes_3979_MANSC1
aatggacaggcttcctcgtt

SEQ ID NO: 8067 - DNA, 20 bp, Artificial Sequence
  Synthetic: descartes_3980_MANSC1
aaatggaaggccgtactgat

SEQ ID NO: 8068 - DNA, 20 bp, Artificial Sequence
  Synthetic: descartes_3981_MANSC1
cttataagcaaggagctggg

SEQ ID NO: 8069 - DNA, 20 bp, Artificial Sequence
  Synthetic: descartes_3982_MANSC1
tgtcccaacgaggaagcctg

SEQ ID NO: 8070 - DNA, 20 bp, Artificial Sequence
  Synthetic: descartes_3983_MANSC1
agatggatgaagcaagtgcc

SEQ ID NO: 8071 - DNA, 20 bp, Artificial Sequence
  Synthetic: descartes_3984_MAP3K1
gctgtagcagcaatagtagt

SEQ ID NO: 8072 - DNA, 20 bp, Artificial Sequence
  Synthetic: descartes_3985_MAP3K1
tctacaattccacagaaact

SEQ ID NO: 8073 - DNA, 20 bp, Artificial Sequence
  Synthetic: descartes_3986_MAP3K1
tgtggaattgtagagaaaac

SEQ ID NO: 8074 - DNA, 20 bp, Artificial Sequence
  Synthetic: descartes_3987_MAP3K1
gcggaaagaatcaaacttca

SEQ ID NO: 8075 - DNA, 20 bp, Artificial Sequence
  Synthetic: descartes_3988_MAP3K1
agacataatcaacaccacca

SEQ ID NO: 8076 - DNA, 20 bp, Artificial Sequence
  Synthetic: descartes_3989_MAP3K1
agagtggcagaatcacacca

SEQ ID NO: 8077 - DNA, 20 bp, Artificial Sequence
  Synthetic: descartes_3990_MAP3K1
agtaggaccttctagttcaa

SEQ ID NO: 8078 - DNA, 20 bp, Artificial Sequence
  Synthetic: descartes_3991_MAP3K1
gtatgtcctggtagagtctc

SEQ ID NO: 8079 - DNA, 20 bp, Artificial Sequence
  Synthetic: descartes_3992_MAP3K7
gaactgtcccccctgcaacc

SEQ ID NO: 8080 - DNA, 20 bp, Artificial Sequence
  Synthetic: descartes_3993_MAP3K7
gatgaaaacaaaagcctttc

SEQ ID NO: 8081 - DNA, 20 bp, Artificial Sequence
  Synthetic: descartes_3994_MAP3K7
cctaagcccattgagagcct

SEQ ID NO: 8082 - DNA, 20 bp, Artificial Sequence
  Synthetic: descartes_3995_MAP3K7
gtacagcctgtgacattcag

SEQ ID NO: 8083 - DNA, 20 bp, Artificial Sequence
  Synthetic: descartes_3996_MAP3K7
agacatgtcagcactcatcc

SEQ ID NO: 8084 - DNA, 20 bp, Artificial Sequence
  Synthetic: descartes_3997_MAP3K7
attctaagcgcttaatagta

SEQ ID NO: 8085 - DNA, 20 bp, Artificial Sequence
  Synthetic: descartes_3998_MAP3K7
ggttgcatgctgtgaagata

SEQ ID NO: 8086 - DNA, 20 bp, Artificial Sequence
  Synthetic: descartes_3999_MAP3K7
tacttactaccagcaatgca

SEQ ID NO: 8087 - DNA, 20 bp, Artificial Sequence
  Synthetic: descartes_4000_MAP3K8
catgagcccagaggtcatcc

SEQ ID NO: 8088 - DNA, 20 bp, Artificial Sequence
  Synthetic: descartes_4001_MAP3K8
accccacaggactgcgccat

SEQ ID NO: 8089 - DNA, 20 bp, Artificial Sequence
  Synthetic: descartes_4002_MAP3K8
tccagaacagaccctccctc

SEQ ID NO: 8090 - DNA, 20 bp, Artificial Sequence
  Synthetic: descartes_4003_MAP3K8
ctaaggacctccgaggaaca

SEQ ID NO: 8091 - DNA, 20 bp, Artificial Sequence
  Synthetic: descartes_4004_MAP3K8
tctccagggaagcttctatc

SEQ ID NO: 8092 - DNA, 20 bp, Artificial Sequence
  Synthetic: descartes_4005_MAP3K8
aatgtgtctgatgtaataga

SEQ ID NO: 8093 - DNA, 20 bp, Artificial Sequence
  Synthetic: descartes_4006_MAP3K8
gcctaagtgttcaaatgacc

SEQ ID NO: 8094 - DNA, 20 bp, Artificial Sequence
  Synthetic: descartes_4007_MAP3K8
agtgtagaaaatcaagtccc

SEQ ID NO: 8095 - DNA, 20 bp, Artificial Sequence
  Synthetic: descartes_4008_MAP7D2
actggtcccccgacattccc

SEQ ID NO: 8096 - DNA, 20 bp, Artificial Sequence
  Synthetic: descartes_4009_MAP7D2
gtccagagacaccccaggaa

SEQ ID NO: 8097 - DNA, 20 bp, Artificial Sequence
  Synthetic: descartes_4010_MAP7D2
gccagaagcagagcttcagt

SEQ ID NO: 8098 - DNA, 20 bp, Artificial Sequence
  Synthetic: descartes_4011_MAP7D2
gagtgggtgaagacttgtaa

SEQ ID NO: 8099 - DNA, 20 bp, Artificial Sequence
  Synthetic: descartes_4012_MAP7D2
tcttccacagcagctctctt

SEQ ID NO: 8100 - DNA, 20 bp, Artificial Sequence
  Synthetic: descartes_4013_MAP7D2
ccatcaagggcatccagatg

SEQ ID NO: 8101 - DNA, 20 bp, Artificial Sequence
  Synthetic: descartes_4014_MAP7D2
tggaggcattcctaagagac

SEQ ID NO: 8102 - DNA, 20 bp, Artificial Sequence
  Synthetic: descartes_4015_MAP7D2
gcgactgttgacacccacac

SEQ ID NO: 8103 - DNA, 20 bp, Artificial Sequence
  Synthetic: descartes_4016_MAPK1
tgtggaagagaaagcaaata

SEQ ID NO: 8104 - DNA, 20 bp, Artificial Sequence
  Synthetic: descartes_4017_MAPK1
ggaacagcctgttccatggc

SEQ ID NO: 8105 - DNA, 20 bp, Artificial Sequence
  Synthetic: descartes_4018_MAPK1
cagggaagcattatcttgac

SEQ ID NO: 8106 - DNA, 20 bp, Artificial Sequence
  Synthetic: descartes_4019_MAPK1
aagagactgctagattccag

SEQ ID NO: 8107 - DNA, 20 bp, Artificial Sequence
  Synthetic: descartes_4020_MAPK1
cttaggcaagtcatccaatt

SEQ ID NO: 8108 - DNA, 20 bp, Artificial Sequence
  Synthetic: descartes_4021_MAPK1
tctaccagatcctcagaggg

SEQ ID NO: 8109 - DNA, 20 bp, Artificial Sequence
  Synthetic: descartes_4022_MAPK1
ttgatagctactcgaacttt

SEQ ID NO: 8110 - DNA, 20 bp, Artificial Sequence
  Synthetic: descartes_4023_MAPK1
accctctgaggatctggtag

SEQ ID NO: 8111 - DNA, 20 bp, Artificial Sequence
  Synthetic: descartes_4024_MARCH7
aatgatacctatcactcaag

SEQ ID NO: 8112 - DNA, 20 bp, Artificial Sequence
  Synthetic: descartes_4025_MARCH7
gagagaagaacagattcctc

SEQ ID NO: 8113 - DNA, 20 bp, Artificial Sequence
  Synthetic: descartes_4026_MARCH7
ccatcagctgaattccaacc

SEQ ID NO: 8114 - DNA, 20 bp, Artificial Sequence
  Synthetic: descartes_4027_MARCH7
gaggactcagaagaagaaga

SEQ ID NO: 8115 - DNA, 20 bp, Artificial Sequence
  Synthetic: descartes_4028_MARCH7
tgttcaaccttccagctcct

SEQ ID NO: 8116 - DNA, 20 bp, Artificial Sequence
  Synthetic: descartes_4029_MARCH7
accaagaatctgaaggtaga

SEQ ID NO: 8117 - DNA, 20 bp, Artificial Sequence
  Synthetic: descartes_4030_MARCH7
ctgtacaaactgtactacct

SEQ ID NO: 8118 - DNA, 20 bp, Artificial Sequence
  Synthetic: descartes_4031_MARCH7
tggagtccctagaacttagt

SEQ ID NO: 8119 - DNA, 20 bp, Artificial Sequence
  Synthetic: descartes_4032_MARCH8
agagaagggagaaggacaat

SEQ ID NO: 8120 - DNA, 20 bp, Artificial Sequence
  Synthetic: descartes_4033_MARCH8
gagacaacagcagactgcac

SEQ ID NO: 8121 - DNA, 20 bp, Artificial Sequence
  Synthetic: descartes_4034_MARCH8
ccttcagaacaagttctttc

SEQ ID NO: 8122 - DNA, 20 bp, Artificial Sequence
  Synthetic: descartes_4035_MARCH8
cctatgtggaaagaacttgt

SEQ ID NO: 8123 - DNA, 20 bp, Artificial Sequence
  Synthetic: descartes_4036_MARCH8
cactgaacatacataaaaag

SEQ ID NO: 8124 - DNA, 20 bp, Artificial Sequence
  Synthetic: descartes_4037_MARCH8
tgtcggaatgacagattcca

SEQ ID NO: 8125 - DNA, 20 bp, Artificial Sequence
  Synthetic: descartes_4038_MARCH8
gtcttacttctgtagactct

SEQ ID NO: 8126 - DNA, 20 bp, Artificial Sequence
  Synthetic: descartes_4039_MARCH8
gtccaaaagggccattctag

SEQ ID NO: 8127 - DNA, 20 bp, Artificial Sequence
  Synthetic: descartes_4040_MASP2
agggtgtgtctccacatcga

SEQ ID NO: 8128 - DNA, 20 bp, Artificial Sequence
  Synthetic: descartes_4041_MASP2
acctgtgcaagccaaataca

SEQ ID NO: 8129 - DNA, 20 bp, Artificial Sequence
  Synthetic: descartes_4042_MASP2
actatctagaaacaccagtg

SEQ ID NO: 8130 - DNA, 20 bp, Artificial Sequence
  Synthetic: descartes_4043_MASP2
tgtagactccatactgacct

SEQ ID NO: 8131 - DNA, 20 bp, Artificial Sequence
  Synthetic: descartes_4044_MASP2
agggtgcccattcgaatgtc

SEQ ID NO: 8132 - DNA, 20 bp, Artificial Sequence
  Synthetic: descartes_4045_MASP2
atcagtgctatgtcattgtc

SEQ ID NO: 8133 - DNA, 20 bp, Artificial Sequence
  Synthetic: descartes_4046_MASP2
tatgacaactgggtcctaac

SEQ ID NO: 8134 - DNA, 20 bp, Artificial Sequence
  Synthetic: descartes_4047_MASP2
caggggagtatgccaatgac

SEQ ID NO: 8135 - DNA, 20 bp, Artificial Sequence
  Synthetic: descartes_4048_MBD5
catccaacagcacttcaaac

SEQ ID NO: 8136 - DNA, 20 bp, Artificial Sequence
  Synthetic: descartes_4049_MBD5
cagatcccagtatgaactct

SEQ ID NO: 8137 - DNA, 20 bp, Artificial Sequence
  Synthetic: descartes_4050_MBD5
acagcagctccaggatcaaa

SEQ ID NO: 8138 - DNA, 20 bp, Artificial Sequence
  Synthetic: descartes_4051_MBD5
ggagatgctgttgattcact

SEQ ID NO: 8139 - DNA, 20 bp, Artificial Sequence
  Synthetic: descartes_4052_MBD5
aggtataataactacaaaag

SEQ ID NO: 8140 - DNA, 20 bp, Artificial Sequence
  Synthetic: descartes_4053_MBD5
aggagagactagagaacact

SEQ ID NO: 8141 - DNA, 20 bp, Artificial Sequence
  Synthetic: descartes_4054_MBD5
ctctcagcagcagccaaagc

SEQ ID NO: 8142 - DNA, 20 bp, Artificial Sequence
  Synthetic: descartes_4055_MBD5
ggagagctgcatcttcctgc

SEQ ID NO: 8143 - DNA, 20 bp, Artificial Sequence
  Synthetic: descartes_4056_MBL2
agtagcaatacacaatcttc

SEQ ID NO: 8144 - DNA, 20 bp, Artificial Sequence
  Synthetic: descartes_4057_MBL2
ctgtcagatccacaaactgc

SEQ ID NO: 8145 - DNA, 20 bp, Artificial Sequence
  Synthetic: descartes_4058_MBL2
tgagtaagacgctgccacca

SEQ ID NO: 8146 - DNA, 20 bp, Artificial Sequence
  Synthetic: descartes_4059_MBL2
ctggaggccccaactttcca

SEQ ID NO: 8147 - DNA, 20 bp, Artificial Sequence
  Synthetic: descartes_4060_MBL2
catcactccctctccttctc

SEQ ID NO: 8148 - DNA, 20 bp, Artificial Sequence
  Synthetic: descartes_4061_MBL2
cctgggaagccgttgatgcc

SEQ ID NO: 8149 - DNA, 20 bp, Artificial Sequence
  Synthetic: descartes_4062_MBL2
tgaggcagccaggctactat

SEQ ID NO: 8150 - DNA, 20 bp, Artificial Sequence
  Synthetic: descartes_4063_MBL2
tgtaggtcagtctatttcct

SEQ ID NO: 8151 - DNA, 20 bp, Artificial Sequence
  Synthetic: descartes_4064_MBTD1
cctgaggtagtcaaaccatt

SEQ ID NO: 8152 - DNA, 20 bp, Artificial Sequence
  Synthetic: descartes_4065_MBTD1
acagaaaccgacagggaaaa

SEQ ID NO: 8153 - DNA, 20 bp, Artificial Sequence
  Synthetic: descartes_4066_MBTD1
atatgtgtagccacagtaac

SEQ ID NO: 8154 - DNA, 20 bp, Artificial Sequence
  Synthetic: descartes_4067_MBTD1
agctggggtaactacatcaa

SEQ ID NO: 8155 - DNA, 20 bp, Artificial Sequence
  Synthetic: descartes_4068_MBTD1
atgggtctatagcttccaat

SEQ ID NO: 8156 - DNA, 20 bp, Artificial Sequence
  Synthetic: descartes_4069_MBTD1
ccatctgggtatgtgtagac

SEQ ID NO: 8157 - DNA, 20 bp, Artificial Sequence
  Synthetic: descartes_4070_MBTD1
actagaaaagctttccagtt

SEQ ID NO: 8158 - DNA, 20 bp, Artificial Sequence
  Synthetic: descartes_4071_MBTD1
gcaccagtaagtcgtttcac

SEQ ID NO: 8159 - DNA, 20 bp, Artificial Sequence
  Synthetic: descartes_4072_MCOLN1
atgagtccctgcgacaagtt

SEQ ID NO: 8160 - DNA, 20 bp, Artificial Sequence
  Synthetic: descartes_4073_MCOLN1
gagccaagggccgcaagccc

SEQ ID NO: 8161 - DNA, 20 bp, Artificial Sequence
  Synthetic: descartes_4074_MCOLN1
ggctcagtaatcagctggct

SEQ ID NO: 8162 - DNA, 20 bp, Artificial Sequence
  Synthetic: descartes_4075_MCOLN1
agacgacggcgaaggtcttc

SEQ ID NO: 8163 - DNA, 20 bp, Artificial Sequence
  Synthetic: descartes_4076_MCOLN1
acgtggtggtcatcctcacc

SEQ ID NO: 8164 - DNA, 20 bp, Artificial Sequence
  Synthetic: descartes_4077_MCOLN1
acaacaaagcacacagtggg

SEQ ID NO: 8165 - DNA, 20 bp, Artificial Sequence
  Synthetic: descartes_4078_MCOLN1
acattgatccgatggtggtt

SEQ ID NO: 8166 - DNA, 20 bp, Artificial Sequence
  Synthetic: descartes_4079_MCOLN1
agcgtgaggttcttgtaact

SEQ ID NO: 8167 - DNA, 20 bp, Artificial Sequence
  Synthetic: descartes_4080_MCOLN2
atatggagccaatgattgtc

SEQ ID NO: 8168 - DNA, 20 bp, Artificial Sequence
  Synthetic: descartes_4081_MCOLN2
ggttggagtcatcagatacc

SEQ ID NO: 8169 - DNA, 20 bp, Artificial Sequence
  Synthetic: descartes_4082_MCOLN2
acaagggctcatgaagtaaa

SEQ ID NO: 8170 - DNA, 20 bp, Artificial Sequence
  Synthetic: descartes_4083_MCOLN2
gcagtgaggcctgcattgtt

SEQ ID NO: 8171 - DNA, 20 bp, Artificial Sequence
  Synthetic: descartes_4084_MCOLN2
aggaaacccattctgttgga

SEQ ID NO: 8172 - DNA, 20 bp, Artificial Sequence
  Synthetic: descartes_4085_MCOLN2
gcatcactgtcaaaatagat

SEQ ID NO: 8173 - DNA, 20 bp, Artificial Sequence
  Synthetic: descartes_4086_MCOLN2
cttctaatgagacactgaat

SEQ ID NO: 8174 - DNA, 20 bp, Artificial Sequence
  Synthetic: descartes_4087_MCOLN2
tatatatgattctcagtctt

SEQ ID NO: 8175 - DNA, 20 bp, Artificial Sequence
  Synthetic: descartes_4088_MDFIC
caagcagtctgatgattcac

SEQ ID NO: 8176 - DNA, 20 bp, Artificial Sequence
  Synthetic: descartes_4089_MDFIC
cagacaagctggactgaatt

SEQ ID NO: 8177 - DNA, 20 bp, Artificial Sequence
  Synthetic: descartes_4090_MDFIC
cccaaatggactggtcttgc

SEQ ID NO: 8178 - DNA, 20 bp, Artificial Sequence
  Synthetic: descartes_4091_MDFIC
ccaaaagacaggctcttcac

SEQ ID NO: 8179 - DNA, 20 bp, Artificial Sequence
  Synthetic: descartes_4092_MDFIC
tcaaaaaatgcatagaaaaa

SEQ ID NO: 8180 - DNA, 20 bp, Artificial Sequence
  Synthetic: descartes_4093_MDFIC
ggaaaagacagcatttactt

SEQ ID NO: 8181 - DNA, 20 bp, Artificial Sequence
  Synthetic: descartes_4094_MDFIC
gggaaatccttcggatggtg

SEQ ID NO: 8182 - DNA, 20 bp, Artificial Sequence
  Synthetic: descartes_4095_MDFIC
gccccgtggtgaattccatt

SEQ ID NO: 8183 - DNA, 20 bp, Artificial Sequence
  Synthetic: descartes_4096_MECOM
gacagacacctaaagaaaca

SEQ ID NO: 8184 - DNA, 20 bp, Artificial Sequence
  Synthetic: descartes_4097_MECOM
catgcagtactcctcactca

SEQ ID NO: 8185 - DNA, 20 bp, Artificial Sequence
  Synthetic: descartes_4098_MECOM
catgaaggaaaccctgagga

SEQ ID NO: 8186 - DNA, 20 bp, Artificial Sequence
  Synthetic: descartes_4099_MECOM
aaggcactatctaaacaccc

SEQ ID NO: 8187 - DNA, 20 bp, Artificial Sequence
  Synthetic: descartes_4100_MECOM
gatagtgccttcaaaatatc

SEQ ID NO: 8188 - DNA, 20 bp, Artificial Sequence
  Synthetic: descartes_4101_MECOM
aaaggtaacgatctcaagtc

SEQ ID NO: 8189 - DNA, 20 bp, Artificial Sequence
  Synthetic: descartes_4102_MECOM
acggaccctagcaaccttca

SEQ ID NO: 8190 - DNA, 20 bp, Artificial Sequence
  Synthetic: descartes_4103_MECOM
acaggagaactagcaggtat

SEQ ID NO: 8191 - DNA, 20 bp, Artificial Sequence
  Synthetic: descartes_4104_MEF2C
gtgtacagcaaccctgtcag

SEQ ID NO: 8192 - DNA, 20 bp, Artificial Sequence
  Synthetic: descartes_4105_MEF2C
ggaatgaataaccgtaaacc

SEQ ID NO: 8193 - DNA, 20 bp, Artificial Sequence
  Synthetic: descartes_4106_MEF2C
ggttgatgaagaaggcttat

SEQ ID NO: 8194 - DNA, 20 bp, Artificial Sequence
  Synthetic: descartes_4107_MEF2C
ctgtacttgtcctcagactc

SEQ ID NO: 8195 - DNA, 20 bp, Artificial Sequence
  Synthetic: descartes_4108_MEF2C
cgtagcaactcctactttac

SEQ ID NO: 8196 - DNA, 20 bp, Artificial Sequence
  Synthetic: descartes_4109_MEF2C
cctgctgatcattagatcaa

SEQ ID NO: 8197 - DNA, 20 bp, Artificial Sequence
  Synthetic: descartes_4110_MEF2C
acaccgccagcgctcttcac

SEQ ID NO: 8198 - DNA, 20 bp, Artificial Sequence
  Synthetic: descartes_4111_MEF2C
ataatatgatcaagagtcat

SEQ ID NO: 8199 - DNA, 20 bp, Artificial Sequence
  Synthetic: descartes_4112_MEF2D
gcctgatgaagaaggcgtat

SEQ ID NO: 8200 - DNA, 20 bp, Artificial Sequence
  Synthetic: descartes_4113_MEF2D
tgtggcaacgccgagtttac

SEQ ID NO: 8201 - DNA, 20 bp, Artificial Sequence
  Synthetic: descartes_4114_MEF2D
ggctgttgccattggccaca

SEQ ID NO: 8202 - DNA, 20 bp, Artificial Sequence
  Synthetic: descartes_4115_MEF2D
ctcagccagggcctcccctt

SEQ ID NO: 8203 - DNA, 20 bp, Artificial Sequence
  Synthetic: descartes_4116_MEF2D
ctgcctgggaagtgatgact

SEQ ID NO: 8204 - DNA, 20 bp, Artificial Sequence
  Synthetic: descartes_4117_MEF2D
ccatgcctgtcacggtgccc

SEQ ID NO: 8205 - DNA, 20 bp, Artificial Sequence
  Synthetic: descartes_4118_MEF2D
accaagcggaagtttggcct

SEQ ID NO: 8206 - DNA, 20 bp, Artificial Sequence
  Synthetic: descartes_4119_MEF2D
gttcacctggggggctgtcg

SEQ ID NO: 8207 - DNA, 20 bp, Artificial Sequence
  Synthetic: descartes_4120_MICA
ccaggacatcttctgcccac

SEQ ID NO: 8208 - DNA, 20 bp, Artificial Sequence
  Synthetic: descartes_4121_MICA
ccgaggagaggagcagaggt

SEQ ID NO: 8209 - DNA, 20 bp, Artificial Sequence
  Synthetic: descartes_4122_MICA
ttgctgaggtacatctggat

SEQ ID NO: 8210 - DNA, 20 bp, Artificial Sequence
  Synthetic: descartes_4123_MICA
tgctgttgctgctggctgct

SEQ ID NO: 8211 - DNA, 20 bp, Artificial Sequence
  Synthetic: descartes_4124_MICA
tgcctgtcatagcgcaggaa

SEQ ID NO: 8212 - DNA, 20 bp, Artificial Sequence
  Synthetic: descartes_4125_MICA
ccctgcatttctgcctgtca

SEQ ID NO: 8213 - DNA, 20 bp, Artificial Sequence
  Synthetic: descartes_4126_MICA
cgttccctgtcaagtccctg

SEQ ID NO: 8214 - DNA, 20 bp, Artificial Sequence
  Synthetic: descartes_4127_MICA
tgcttctggctggcatcttc

SEQ ID NO: 8215 - DNA, 20 bp, Artificial Sequence
  Synthetic: descartes_4128_MICB
tgcccactgtccctggggct

SEQ ID NO: 8216 - DNA, 20 bp, Artificial Sequence
  Synthetic: descartes_4129_MICB
tgcctgtcatagcgcaggaa

SEQ ID NO: 8217 - DNA, 20 bp, Artificial Sequence
  Synthetic: descartes_4130_MICB
tcgctgagggacatctggat

SEQ ID NO: 8218 - DNA, 20 bp, Artificial Sequence
  Synthetic: descartes_4131_MICB
ccctgcgtttctgcctgtca

SEQ ID NO: 8219 - DNA, 20 bp, Artificial Sequence
  Synthetic: descartes_4132_MICB
tggtccttgatatgagtcag

SEQ ID NO: 8220 - DNA, 20 bp, Artificial Sequence
  Synthetic: descartes_4133_MICB
tggccgtcgccttccctttt

SEQ ID NO: 8221 - DNA, 20 bp, Artificial Sequence
  Synthetic: descartes_4134_MICB
agccacaacacccagcagtg

SEQ ID NO: 8222 - DNA, 20 bp, Artificial Sequence
  Synthetic: descartes_4135_MICB
catatgtttctgctgctatg

SEQ ID NO: 8223 - DNA, 20 bp, Artificial Sequence
  Synthetic: descartes_4136_MLH1
actgagaaactaatgcctgc

SEQ ID NO: 8224 - DNA, 20 bp, Artificial Sequence
  Synthetic: descartes_4137_MLH1
gttgtaatagtaacatgagc

SEQ ID NO: 8225 - DNA, 20 bp, Artificial Sequence
  Synthetic: descartes_4138_MLH1
gatgcaaaatccacaagtat

SEQ ID NO: 8226 - DNA, 20 bp, Artificial Sequence
  Synthetic: descartes_4139_MLH1
ctagtagtgaacctttcaca

SEQ ID NO: 8227 - DNA, 20 bp, Artificial Sequence
  Synthetic: descartes_4140_MLH1
acagaagatggaaatatcct

SEQ ID NO: 8228 - DNA, 20 bp, Artificial Sequence
  Synthetic: descartes_4141_MLH1
caacatagccacgaggagaa

SEQ ID NO: 8229 - DNA, 20 bp, Artificial Sequence
  Synthetic: descartes_4142_MLH1
gaaatcagtccccagaatgt

SEQ ID NO: 8230 - DNA, 20 bp, Artificial Sequence
  Synthetic: descartes_4143_MLH1
gagggactgcctatcttcat

SEQ ID NO: 8231 - DNA, 20 bp, Artificial Sequence
  Synthetic: descartes_4144_MLLT10
agatgaggctaaccaacagg

SEQ ID NO: 8232 - DNA, 20 bp, Artificial Sequence
  Synthetic: descartes_4145_MLLT10
ctagaacagggtactcctag

SEQ ID NO: 8233 - DNA, 20 bp, Artificial Sequence
  Synthetic: descartes_4146_MLLT10
tcctgagagtgagaggaaga

SEQ ID NO: 8234 - DNA, 20 bp, Artificial Sequence
  Synthetic: descartes_4147_MLLT10
cctgataattctcttcctgt

SEQ ID NO: 8235 - DNA, 20 bp, Artificial Sequence
  Synthetic: descartes_4148_MLLT10
cagtagccacagtattggac

SEQ ID NO: 8236 - DNA, 20 bp, Artificial Sequence
  Synthetic: descartes_4149_MLLT10
caggaagtctctgcacacac

SEQ ID NO: 8237 - DNA, 20 bp, Artificial Sequence
  Synthetic: descartes_4150_MLLT10
tgaccagcaacgacaaatac

SEQ ID NO: 8238 - DNA, 20 bp, Artificial Sequence
  Synthetic: descartes_4151_MLLT10
atacaggaagagaattatca

SEQ ID NO: 8239 - DNA, 20 bp, Artificial Sequence
  Synthetic: descartes_4152_MLLT6
ctggttggctgaggctcctt

SEQ ID NO: 8240 - DNA, 20 bp, Artificial Sequence
  Synthetic: descartes_4153_MLLT6
cctccgcctcctcttcttcc

SEQ ID NO: 8241 - DNA, 20 bp, Artificial Sequence
  Synthetic: descartes_4154_MLLT6
gcctcccttctacccacatc

SEQ ID NO: 8242 - DNA, 20 bp, Artificial Sequence
  Synthetic: descartes_4155_MLLT6
ccctttgactccctgctgct

SEQ ID NO: 8243 - DNA, 20 bp, Artificial Sequence
  Synthetic: descartes_4156_MLLT6
ccgccactgctgcctcaccc

SEQ ID NO: 8244 - DNA, 20 bp, Artificial Sequence
  Synthetic: descartes_4157_MLLT6
gccgtcaggctcaggatctg

SEQ ID NO: 8245 - DNA, 20 bp, Artificial Sequence
  Synthetic: descartes_4158_MLLT6
tgctggatctgctggatcat

SEQ ID NO: 8246 - DNA, 20 bp, Artificial Sequence
  Synthetic: descartes_4159_MLLT6
cagtagccgcagtacttgac

SEQ ID NO: 8247 - DNA, 20 bp, Artificial Sequence
  Synthetic: descartes_4160_MOG
tactgggtgagccctggagt

SEQ ID NO: 8248 - DNA, 20 bp, Artificial Sequence
  Synthetic: descartes_4161_MOG
tgagggtgccctgctggaag

SEQ ID NO: 8249 - DNA, 20 bp, Artificial Sequence
  Synthetic: descartes_4162_MOG
taattgtgccggttcttgga

SEQ ID NO: 8250 - DNA, 20 bp, Artificial Sequence
  Synthetic: descartes_4163_MOG
tgtagagatgaaccacccta

SEQ ID NO: 8251 - DNA, 20 bp, Artificial Sequence
  Synthetic: descartes_4164_MOG
agcagctctgtccggccccg

SEQ ID NO: 8252 - DNA, 20 bp, Artificial Sequence
  Synthetic: descartes_4165_MOG
cctcaccaatagcatctttc

SEQ ID NO: 8253 - DNA, 20 bp, Artificial Sequence
  Synthetic: descartes_4166_MOG
acctgcttcttccgagatca

SEQ ID NO: 8254 - DNA, 20 bp, Artificial Sequence
  Synthetic: descartes_4167_MOG
aattccattgctgcctcctc

SEQ ID NO: 8255 - DNA, 20 bp, Artificial Sequence
  Synthetic: descartes_4168_MORF4L1
agagaccacagtatgctgaa

SEQ ID NO: 8256 - DNA, 20 bp, Artificial Sequence
  Synthetic: descartes_4169_MORF4L1
tgttgcagaccagatgtctt

SEQ ID NO: 8257 - DNA, 20 bp, Artificial Sequence
  Synthetic: descartes_4170_MORF4L1
ctgttcctgaaggagctccc

SEQ ID NO: 8258 - DNA, 20 bp, Artificial Sequence
  Synthetic: descartes_4171_MORF4L1
ctggggcagcccctctcatc

SEQ ID NO: 8259 - DNA, 20 bp, Artificial Sequence
  Synthetic: descartes_4172_MORF4L1
acttcaactctgttcatgaa

SEQ ID NO: 8260 - DNA, 20 bp, Artificial Sequence
  Synthetic: descartes_4173_MORF4L1
cctggtaattaagtcccagt

SEQ ID NO: 8261 - DNA, 20 bp, Artificial Sequence
  Synthetic: descartes_4174_MORF4L1
ttccaaccactgtaatgtat

SEQ ID NO: 8262 - DNA, 20 bp, Artificial Sequence
  Synthetic: descartes_4175_MORF4L1
cagaaacagcgagaacttca

SEQ ID NO: 8263 - DNA, 20 bp, Artificial Sequence
  Synthetic: descartes_4176_MPHOSPH8
ggaagaaaattgcagagaac

SEQ ID NO: 8264 - DNA, 20 bp, Artificial Sequence
  Synthetic: descartes_4177_MPHOSPH8
aattacaaacccccacagaa

SEQ ID NO: 8265 - DNA, 20 bp, Artificial Sequence
  Synthetic: descartes_4178_MPHOSPH8
aattaactccagaagaaaaa

SEQ ID NO: 8266 - DNA, 20 bp, Artificial Sequence
  Synthetic: descartes_4179_MPHOSPH8
ctcctgcctctgacatcggt

SEQ ID NO: 8267 - DNA, 20 bp, Artificial Sequence
  Synthetic: descartes_4180_MPHOSPH8
ggcatggacctgcagttgga

SEQ ID NO: 8268 - DNA, 20 bp, Artificial Sequence
  Synthetic: descartes_4181_MPHOSPH8
cagtaatataatccccattt

SEQ ID NO: 8269 - DNA, 20 bp, Artificial Sequence
  Synthetic: descartes_4182_MPHOSPH8
ctgcaacagatgcaattcca

SEQ ID NO: 8270 - DNA, 20 bp, Artificial Sequence
  Synthetic: descartes_4183_MPHOSPH8
aagagtagcagaagagacaa

SEQ ID NO: 8271 - DNA, 20 bp, Artificial Sequence
  Synthetic: descartes_4184_MSH2
gtgtaacctgtaaggaagaa

SEQ ID NO: 8272 - DNA, 20 bp, Artificial Sequence
  Synthetic: descartes_4185_MSH2
cccatgtctccagcagtctc

SEQ ID NO: 8273 - DNA, 20 bp, Artificial Sequence
  Synthetic: descartes_4186_MSH2
atatactggctgaagtcaaa

SEQ ID NO: 8274 - DNA, 20 bp, Artificial Sequence
  Synthetic: descartes_4187_MSH2
acacccacaacaccaatgga

SEQ ID NO: 8275 - DNA, 20 bp, Artificial Sequence
  Synthetic: descartes_4188_MSH2
aatgaagagtataccaaaaa

SEQ ID NO: 8276 - DNA, 20 bp, Artificial Sequence
  Synthetic: descartes_4189_MSH2
gagaaaggacaaggaagaat

SEQ ID NO: 8277 - DNA, 20 bp, Artificial Sequence
  Synthetic: descartes_4190_MSH2
cccggaggagagactgctgg

SEQ ID NO: 8278 - DNA, 20 bp, Artificial Sequence
  Synthetic: descartes_4191_MSH2
acttcagccagtatatgaaa

SEQ ID NO: 8279 - DNA, 20 bp, Artificial Sequence
  Synthetic: descartes_4192_MSH6
ccagaagaatacgagttgaa

SEQ ID NO: 8280 - DNA, 20 bp, Artificial Sequence
  Synthetic: descartes_4193_MSH6
ggacaagctcccttaatgaa

SEQ ID NO: 8281 - DNA, 20 bp, Artificial Sequence
  Synthetic: descartes_4194_MSH6
gacttaaaaccatcagcaac

SEQ ID NO: 8282 - DNA, 20 bp, Artificial Sequence
  Synthetic: descartes_4195_MSH6
cccaccttgtaacagatgac

SEQ ID NO: 8283 - DNA, 20 bp, Artificial Sequence
  Synthetic: descartes_4196_MSH6
aggtagaagacacaaccacc

SEQ ID NO: 8284 - DNA, 20 bp, Artificial Sequence
  Synthetic: descartes_4197_MSH6
ctgagtagcctctcaagatc

SEQ ID NO: 8285 - DNA, 20 bp, Artificial Sequence
  Synthetic: descartes_4198_MSH6
atgataccaaacagtagggc

SEQ ID NO: 8286 - DNA, 20 bp, Artificial Sequence
  Synthetic: descartes_4199_MSH6
tgatgagccctcagagccag

SEQ ID NO: 8287 - DNA, 20 bp, Artificial Sequence
  Synthetic: descartes_4200_MSL3
gcagaataccacgatgactt

SEQ ID NO: 8288 - DNA, 20 bp, Artificial Sequence
  Synthetic: descartes_4201_MSL3
actacagtcagaggaactgc

SEQ ID NO: 8289 - DNA, 20 bp, Artificial Sequence
  Synthetic: descartes_4202_MSL3
agacagagtccacaccaggc

SEQ ID NO: 8290 - DNA, 20 bp, Artificial Sequence
  Synthetic: descartes_4203_MSL3
aagggagaagaactaatgaa

SEQ ID NO: 8291 - DNA, 20 bp, Artificial Sequence
  Synthetic: descartes_4204_MSL3
ctctatccatatgaacaagc

SEQ ID NO: 8292 - DNA, 20 bp, Artificial Sequence
  Synthetic: descartes_4205_MSL3
atcggtatcacgaagcacat

SEQ ID NO: 8293 - DNA, 20 bp, Artificial Sequence
  Synthetic: descartes_4206_MSL3
ctcctgttaatgtagtaaca

SEQ ID NO: 8294 - DNA, 20 bp, Artificial Sequence
  Synthetic: descartes_4207_MSL3
gtctttcccaacaataacat

SEQ ID NO: 8295 - DNA, 20 bp, Artificial Sequence
  Synthetic: descartes_4208_MSN
actccaggggaagcctatct

SEQ ID NO: 8296 - DNA, 20 bp, Artificial Sequence
  Synthetic: descartes_4209_MSN
ccatccagcccaacaccacc

SEQ ID NO: 8297 - DNA, 20 bp, Artificial Sequence
  Synthetic: descartes_4210_MSN
gtctgcagtaccaggacact

SEQ ID NO: 8298 - DNA, 20 bp, Artificial Sequence
  Synthetic: descartes_4211_MSN
gtgtcctggtactgcagacc

SEQ ID NO: 8299 - DNA, 20 bp, Artificial Sequence
  Synthetic: descartes_4212_MSN
agccaggtggagaaaccttt

SEQ ID NO: 8300 - DNA, 20 bp, Artificial Sequence
  Synthetic: descartes_4213_MSN
tcatcaagcccattgacaaa

SEQ ID NO: 8301 - DNA, 20 bp, Artificial Sequence
  Synthetic: descartes_4214_MSN
tccacctggctgaaactcaa

SEQ ID NO: 8302 - DNA, 20 bp, Artificial Sequence
  Synthetic: descartes_4215_MSN
tctcggcccagtcgcatgtt

SEQ ID NO: 8303 - DNA, 20 bp, Artificial Sequence
  Synthetic: descartes_4216_MTF2
gtggcacaggaggaacacga

SEQ ID NO: 8304 - DNA, 20 bp, Artificial Sequence
  Synthetic: descartes_4217_MTF2
acgggtgcttccagtgcaaa

SEQ ID NO: 8305 - DNA, 20 bp, Artificial Sequence
  Synthetic: descartes_4218_MTF2
attgggagcttctgaatact

SEQ ID NO: 8306 - DNA, 20 bp, Artificial Sequence
  Synthetic: descartes_4219_MTF2
atctgaatcaatcacactgg

SEQ ID NO: 8307 - DNA, 20 bp, Artificial Sequence
  Synthetic: descartes_4220_MTF2
aatgtccttccagagaaccc

SEQ ID NO: 8308 - DNA, 20 bp, Artificial Sequence
  Synthetic: descartes_4221_MTF2
atgcctccagaacatgctca

SEQ ID NO: 8309 - DNA, 20 bp, Artificial Sequence
  Synthetic: descartes_4222_MTF2
atagtgccaagataaaacaa

SEQ ID NO: 8310 - DNA, 20 bp, Artificial Sequence
  Synthetic: descartes_4223_MTF2
gtgctgcaggtagaatagca

SEQ ID NO: 8311 - DNA, 20 bp, Artificial Sequence
  Synthetic: descartes_4224_MTMR7
cctgtgcctttgagttcaat

SEQ ID NO: 8312 - DNA, 20 bp, Artificial Sequence
  Synthetic: descartes_4225_MTMR7
ggagacactcgatctaccaa

SEQ ID NO: 8313 - DNA, 20 bp, Artificial Sequence
  Synthetic: descartes_4226_MTMR7
gagtggaatgtataaccgct

SEQ ID NO: 8314 - DNA, 20 bp, Artificial Sequence
  Synthetic: descartes_4227_MTMR7
attcaaccccatgctggata

SEQ ID NO: 8315 - DNA, 20 bp, Artificial Sequence
  Synthetic: descartes_4228_MTMR7
gctgttacataggaagtttc

SEQ ID NO: 8316 - DNA, 20 bp, Artificial Sequence
  Synthetic: descartes_4229_MTMR7
ctgtggggtctggagaactc

SEQ ID NO: 8317 - DNA, 20 bp, Artificial Sequence
  Synthetic: descartes_4230_MTMR7
agtttatcgggatagagaac

SEQ ID NO: 8318 - DNA, 20 bp, Artificial Sequence
  Synthetic: descartes_4231_MTMR7
ggtcaccatctagattgcca

SEQ ID NO: 8319 - DNA, 20 bp, Artificial Sequence
  Synthetic: descartes_4232_MUM1
gcccgaaccgcgacttcaac

SEQ ID NO: 8320 - DNA, 20 bp, Artificial Sequence
  Synthetic: descartes_4233_MUM1
ccatcggcagaggacatact

SEQ ID NO: 8321 - DNA, 20 bp, Artificial Sequence
  Synthetic: descartes_4234_MUM1
gcagggcattctccaggctc

SEQ ID NO: 8322 - DNA, 20 bp, Artificial Sequence
  Synthetic: descartes_4235_MUM1
agaggacgacacggagagag

SEQ ID NO: 8323 - DNA, 20 bp, Artificial Sequence
  Synthetic: descartes_4236_MUM1
ctctagagagaggatttgca

SEQ ID NO: 8324 - DNA, 20 bp, Artificial Sequence
  Synthetic: descartes_4237_MUM1
acagtgtctcttaaaagttt

SEQ ID NO: 8325 - DNA, 20 bp, Artificial Sequence
  Synthetic: descartes_4238_MUM1
gagtcaagaaagctctgcag

SEQ ID NO: 8326 - DNA, 20 bp, Artificial Sequence
  Synthetic: descartes_4239_MUM1
gggttcatgtgtccttcgat

SEQ ID NO: 8327 - DNA, 20 bp, Artificial Sequence
  Synthetic: descartes_4240_MYH10
gatgaagaatgctggttccc

SEQ ID NO: 8328 - DNA, 20 bp, Artificial Sequence
  Synthetic: descartes_4241_MYH10
gcagcaagtcttgccctcat

SEQ ID NO: 8329 - DNA, 20 bp, Artificial Sequence
  Synthetic: descartes_4242_MYH10
gaagagaagaatatccttgc

SEQ ID NO: 8330 - DNA, 20 bp, Artificial Sequence
  Synthetic: descartes_4243_MYH10
ggtgttctcctgctccagat

SEQ ID NO: 8331 - DNA, 20 bp, Artificial Sequence
  Synthetic: descartes_4244_MYH10
gaatgatacaacgaacaaag

SEQ ID NO: 8332 - DNA, 20 bp, Artificial Sequence
  Synthetic: descartes_4245_MYH10
gctgtccaatcagcttgagt

SEQ ID NO: 8333 - DNA, 20 bp, Artificial Sequence
  Synthetic: descartes_4246_MYH10
tcctagaacaagaggaatac

SEQ ID NO: 8334 - DNA, 20 bp, Artificial Sequence
  Synthetic: descartes_4247_MYH10
gtcctcgagaagcagaatct

SEQ ID NO: 8335 - DNA, 20 bp, Artificial Sequence
  Synthetic: descartes_4248_MYO1G
tctccaagtgcagttcatgc

SEQ ID NO: 8336 - DNA, 20 bp, Artificial Sequence
  Synthetic: descartes_4249_MYO1G
agtgggtggtgaacaggatc

SEQ ID NO: 8337 - DNA, 20 bp, Artificial Sequence
  Synthetic: descartes_4250_MYO1G
gccgagacttccggatcaag

SEQ ID NO: 8338 - DNA, 20 bp, Artificial Sequence
  Synthetic: descartes_4251_MYO1G
acacaccagggagcaggact

SEQ ID NO: 8339 - DNA, 20 bp, Artificial Sequence
  Synthetic: descartes_4252_MYO1G
ccatactcagggccttcctc

SEQ ID NO: 8340 - DNA, 20 bp, Artificial Sequence
  Synthetic: descartes_4253_MYO1G
gcaagtacatggacatcaac

SEQ ID NO: 8341 - DNA, 20 bp, Artificial Sequence
  Synthetic: descartes_4254_MYO1G
gccacagcaagctgttcatc

SEQ ID NO: 8342 - DNA, 20 bp, Artificial Sequence
  Synthetic: descartes_4255_MYO1G
gaccaagtgaccatggagga

SEQ ID NO: 8343 - DNA, 20 bp, Artificial Sequence
  Synthetic: descartes_4256_NAMPT
gctacagaggagtctcttcc

SEQ ID NO: 8344 - DNA, 20 bp, Artificial Sequence
  Synthetic: descartes_4257_NAMPT
attagagcaagtcctgctac

SEQ ID NO: 8345 - DNA, 20 bp, Artificial Sequence
  Synthetic: descartes_4258_NAMPT
cttcctccagtgtaacaaaa

SEQ ID NO: 8346 - DNA, 20 bp, Artificial Sequence
  Synthetic: descartes_4259_NAMPT
ggtaagaagtttcctgttac

SEQ ID NO: 8347 - DNA, 20 bp, Artificial Sequence
  Synthetic: descartes_4260_NAMPT
atagtatcaagaagtacaca

SEQ ID NO: 8348 - DNA, 20 bp, Artificial Sequence
  Synthetic: descartes_4261_NAMPT
ctgttactgagaactcaaag

SEQ ID NO: 8349 - DNA, 20 bp, Artificial Sequence
  Synthetic: descartes_4262_NAMPT
tgggttgcagtacattctta

SEQ ID NO: 8350 - DNA, 20 bp, Artificial Sequence
  Synthetic: descartes_4263_NAMPT
attaaagacatcatcttgga

SEQ ID NO: 8351 - DNA, 20 bp, Artificial Sequence
  Synthetic: descartes_4264_NBN
cttccaatagatggttcatc

SEQ ID NO: 8352 - DNA, 20 bp, Artificial Sequence
  Synthetic: descartes_4265_NBN
cttccaaacactccaaaagt

SEQ ID NO: 8353 - DNA, 20 bp, Artificial Sequence
  Synthetic: descartes_4266_NBN
gttgaccataatcatcattt

SEQ ID NO: 8354 - DNA, 20 bp, Artificial Sequence
  Synthetic: descartes_4267_NBN
ccagagacatctaaacaaga

SEQ ID NO: 8355 - DNA, 20 bp, Artificial Sequence
  Synthetic: descartes_4268_NBN
gaacaaacacaacctgctac

SEQ ID NO: 8356 - DNA, 20 bp, Artificial Sequence
  Synthetic: descartes_4269_NBN
gaagcatctcactatcatcc

SEQ ID NO: 8357 - DNA, 20 bp, Artificial Sequence
  Synthetic: descartes_4270_NBN
cttccaacaacgtactcaac

SEQ ID NO: 8358 - DNA, 20 bp, Artificial Sequence
  Synthetic: descartes_4271_NBN
gctgaccatagtgagtcttc

SEQ ID NO: 8359 - DNA, 20 bp, Artificial Sequence
  Synthetic: descartes_4272_NCK1
gtactagaccaaccatacca

SEQ ID NO: 8360 - DNA, 20 bp, Artificial Sequence
  Synthetic: descartes_4273_NCK1
gctactaccaccacttcttc

SEQ ID NO: 8361 - DNA, 20 bp, Artificial Sequence
  Synthetic: descartes_4274_NCK1
cgctgcccaatgcagtagac

SEQ ID NO: 8362 - DNA, 20 bp, Artificial Sequence
  Synthetic: descartes_4275_NCK1
aagggaaccatccaacttgt

SEQ ID NO: 8363 - DNA, 20 bp, Artificial Sequence
  Synthetic: descartes_4276_NCK1
caagtgaacaaggagaaaaa

SEQ ID NO: 8364 - DNA, 20 bp, Artificial Sequence
  Synthetic: descartes_4277_NCK1
gaaccatcacctccacagtg

SEQ ID NO: 8365 - DNA, 20 bp, Artificial Sequence
  Synthetic: descartes_4278_NCK1
actacatggctgagagagag

SEQ ID NO: 8366 - DNA, 20 bp, Artificial Sequence
  Synthetic: descartes_4279_NCK1
gagaaaggagatgtaatgga

SEQ ID NO: 8367 - DNA, 20 bp, Artificial Sequence
  Synthetic: descartes_4280_NCK2
tagtgttccaccagctcgtc

SEQ ID NO: 8368 - DNA, 20 bp, Artificial Sequence
  Synthetic: descartes_4281_NCK2
agggacacggagaagtcgct

SEQ ID NO: 8369 - DNA, 20 bp, Artificial Sequence
  Synthetic: descartes_4282_NCK2
gggacgaggcccacctggcc

SEQ ID NO: 8370 - DNA, 20 bp, Artificial Sequence
  Synthetic: descartes_4283_NCK2
catttccaccactcggggtc

SEQ ID NO: 8371 - DNA, 20 bp, Artificial Sequence
  Synthetic: descartes_4284_NCK2
ttcttccctgacgctttaag

SEQ ID NO: 8372 - DNA, 20 bp, Artificial Sequence
  Synthetic: descartes_4285_NCK2
caccactcggggtcgttctc

SEQ ID NO: 8373 - DNA, 20 bp, Artificial Sequence
  Synthetic: descartes_4286_NCKAP1L
ggtggaaggcccgagacacc

SEQ ID NO: 8374 - DNA, 20 bp, Artificial Sequence
  Synthetic: descartes_4287_NCKAP1L
gctgctcagcacagatctcc

SEQ ID NO: 8375 - DNA, 20 bp, Artificial Sequence
  Synthetic: descartes_4288_NCKAP1L
ggaccagtacatcgtgaaaa

SEQ ID NO: 8376 - DNA, 20 bp, Artificial Sequence
  Synthetic: descartes_4289_NCKAP1L
ggtgcagatgcttccagagt

SEQ ID NO: 8377 - DNA, 20 bp, Artificial Sequence
  Synthetic: descartes_4290_NCKAP1L
cctcccactccttgccactg

SEQ ID NO: 8378 - DNA, 20 bp, Artificial Sequence
  Synthetic: descartes_4291_NCKAP1L
actcaggaacttcatgccat

SEQ ID NO: 8379 - DNA, 20 bp, Artificial Sequence
  Synthetic: descartes_4292_NCKAP1L
ccaacatagatgtccgaaac

SEQ ID NO: 8380 - DNA, 20 bp, Artificial Sequence
  Synthetic: descartes_4293_NCKAP1L
ccttatgtcctgcttcgaaa

SEQ ID NO: 8381 - DNA, 20 bp, Artificial Sequence
  Synthetic: descartes_4294_NCOA1
cttgtacctgtccagtcact

SEQ ID NO: 8382 - DNA, 20 bp, Artificial Sequence
  Synthetic: descartes_4295_NCOA1
gctgtgacacagtgaaacac

SEQ ID NO: 8383 - DNA, 20 bp, Artificial Sequence
  Synthetic: descartes_4296_NCOA1
actgtgtcacagccaaaatc

SEQ ID NO: 8384 - DNA, 20 bp, Artificial Sequence
  Synthetic: descartes_4297_NCOA1
ccatcactagagctgttgtc

SEQ ID NO: 8385 - DNA, 20 bp, Artificial Sequence
  Synthetic: descartes_4298_NCOA1
gaagaactagctgagttact

SEQ ID NO: 8386 - DNA, 20 bp, Artificial Sequence
  Synthetic: descartes_4299_NCOA1
ctgtcatgcctctgctcacc

SEQ ID NO: 8387 - DNA, 20 bp, Artificial Sequence
  Synthetic: descartes_4300_NCOA1
cactcaagctgtcaatgtca

SEQ ID NO: 8388 - DNA, 20 bp, Artificial Sequence
  Synthetic: descartes_4301_NCOA1
aatgaaatgattcaatctga

SEQ ID NO: 8389 - DNA, 20 bp, Artificial Sequence
  Synthetic: descartes_4302_NCOA3
gcaggacccacaatgccaca

SEQ ID NO: 8390 - DNA, 20 bp, Artificial Sequence
  Synthetic: descartes_4303_NCOA3
aaggaaacagtaagacagat

SEQ ID NO: 8391 - DNA, 20 bp, Artificial Sequence
  Synthetic: descartes_4304_NCOA3
ctggaggacttgagccaaca

SEQ ID NO: 8392 - DNA, 20 bp, Artificial Sequence
  Synthetic: descartes_4305_NCOA3
ccagcagcagtttgcccacc

SEQ ID NO: 8393 - DNA, 20 bp, Artificial Sequence
  Synthetic: descartes_4306_NCOA3
gtaagccccagtctcctgag

SEQ ID NO: 8394 - DNA, 20 bp, Artificial Sequence
  Synthetic: descartes_4307_NCOA3
gactaaaaaatctctgaata

SEQ ID NO: 8395 - DNA, 20 bp, Artificial Sequence
  Synthetic: descartes_4308_NCOA3
ctggacaaatgagacccaaa

SEQ ID NO: 8396 - DNA, 20 bp, Artificial Sequence
  Synthetic: descartes_4309_NCOA3
gggcaagaccaggactccca

SEQ ID NO: 8397 - DNA, 20 bp, Artificial Sequence
  Synthetic: descartes_4310_NCSTN
ccaaggcatactgtacaaca

SEQ ID NO: 8398 - DNA, 20 bp, Artificial Sequence
  Synthetic: descartes_4311_NCSTN
actggcacagtggtcaacct

SEQ ID NO: 8399 - DNA, 20 bp, Artificial Sequence
  Synthetic: descartes_4312_NCSTN
aggggatatatatcttcctc

SEQ ID NO: 8400 - DNA, 20 bp, Artificial Sequence
  Synthetic: descartes_4313_NCSTN
tgagaaacaggatctgtgtg

SEQ ID NO: 8401 - DNA, 20 bp, Artificial Sequence
  Synthetic: descartes_4314_NCSTN
gcatgctccacacattgtaa

SEQ ID NO: 8402 - DNA, 20 bp, Artificial Sequence
  Synthetic: descartes_4315_NCSTN
gatgcacacagatcctgttt

SEQ ID NO: 8403 - DNA, 20 bp, Artificial Sequence
  Synthetic: descartes_4316_NCSTN
ccgtgcagttagagaatgtt

SEQ ID NO: 8404 - DNA, 20 bp, Artificial Sequence
  Synthetic: descartes_4317_NCSTN
gatggagctgcgccgcatgc

SEQ ID NO: 8405 - DNA, 20 bp, Artificial Sequence
  Synthetic: descartes_4318_NDFIP1
attagagagagaccaaatcc

SEQ ID NO: 8406 - DNA, 20 bp, Artificial Sequence
  Synthetic: descartes_4319_NDFIP1
cctgaccacttcagctgcag

SEQ ID NO: 8407 - DNA, 20 bp, Artificial Sequence
  Synthetic: descartes_4320_NDFIP1
actacaaggatgagtctggg

SEQ ID NO: 8408 - DNA, 20 bp, Artificial Sequence
  Synthetic: descartes_4321_NDFIP1
caaagcccccatcttacaat

SEQ ID NO: 8409 - DNA, 20 bp, Artificial Sequence
  Synthetic: descartes_4322_NDFIP1
ctatcctcagctggtcagca

SEQ ID NO: 8410 - DNA, 20 bp, Artificial Sequence
  Synthetic: descartes_4323_NDFIP1
gtctctctctaattaaatgg

SEQ ID NO: 8411 - DNA, 20 bp, Artificial Sequence
  Synthetic: descartes_4324_NDFIP1
atgatgctgaccagctgagg

SEQ ID NO: 8412 - DNA, 20 bp, Artificial Sequence
  Synthetic: descartes_4325_NDFIP1
gaaacccagactcatccttg

SEQ ID NO: 8413 - DNA, 20 bp, Artificial Sequence
  Synthetic: descartes_4326_NDUFA5
accatagccagcttctcatt

SEQ ID NO: 8414 - DNA, 20 bp, Artificial Sequence
  Synthetic: descartes_4327_NDUFA5
ctcaagaacatcaagaatct

SEQ ID NO: 8415 - DNA, 20 bp, Artificial Sequence
  Synthetic: descartes_4328_NDUFA5
gggatttcctcaagaacatc

SEQ ID NO: 8416 - DNA, 20 bp, Artificial Sequence
  Synthetic: descartes_4329_NDUFA5
cactgatcggcaggaggctc

SEQ ID NO: 8417 - DNA, 20 bp, Artificial Sequence
  Synthetic: descartes_4330_NDUFA5
ttgccagatttagttcatgt

SEQ ID NO: 8418 - DNA, 20 bp, Artificial Sequence
  Synthetic: descartes_4331_NDUFA5
taatctgttctgtatacttt

SEQ ID NO: 8419 - DNA, 20 bp, Artificial Sequence
  Synthetic: descartes_4332_NDUFA5
cattccctcatttttcttgc

SEQ ID NO: 8420 - DNA, 20 bp, Artificial Sequence
  Synthetic: descartes_4333_NDUFA5
tatatgctgcatttttaggg

SEQ ID NO: 8421 - DNA, 20 bp, Artificial Sequence
  Synthetic: descartes_4334_NECTIN2
cctggatctagaggatgagg

SEQ ID NO: 8422 - DNA, 20 bp, Artificial Sequence
  Synthetic: descartes_4335_NECTIN2
ccaacacctgagctttcgga

SEQ ID NO: 8423 - DNA, 20 bp, Artificial Sequence
  Synthetic: descartes_4336_NECTIN2
caggagcagcagcagcagca

SEQ ID NO: 8424 - DNA, 20 bp, Artificial Sequence
  Synthetic: descartes_4337_NECTIN2
ggatcgtagaatcccccgtc

SEQ ID NO: 8425 - DNA, 20 bp, Artificial Sequence
  Synthetic: descartes_4338_NECTIN2
caggtgaccgtgacaccatc

SEQ ID NO: 8426 - DNA, 20 bp, Artificial Sequence
  Synthetic: descartes_4339_NECTIN2
gcttcccagtccagggatga

SEQ ID NO: 8427 - DNA, 20 bp, Artificial Sequence
  Synthetic: descartes_4340_NECTIN2
ccaccttccccaaggggtcc

SEQ ID NO: 8428 - DNA, 20 bp, Artificial Sequence
  Synthetic: descartes_4341_NECTIN2
tctgccttctcttcctcctc

SEQ ID NO: 8429 - DNA, 20 bp, Artificial Sequence
  Synthetic: descartes_4342_NFATC1
gcttccatctcccagacatg

SEQ ID NO: 8430 - DNA, 20 bp, Artificial Sequence
  Synthetic: descartes_4343_NFATC1
gagctagggaggacgtcttc

SEQ ID NO: 8431 - DNA, 20 bp, Artificial Sequence
  Synthetic: descartes_4344_NFATC1
acctaccttcccgccaacgg

SEQ ID NO: 8432 - DNA, 20 bp, Artificial Sequence
  Synthetic: descartes_4345_NFATC1
ggaatcagaggataaccagc

SEQ ID NO: 8433 - DNA, 20 bp, Artificial Sequence
  Synthetic: descartes_4346_NFATC1
tacgtctgcaacgggaagag

SEQ ID NO: 8434 - DNA, 20 bp, Artificial Sequence
  Synthetic: descartes_4347_NFATC1
tcttcccgttgcagacgtag

SEQ ID NO: 8435 - DNA, 20 bp, Artificial Sequence
  Synthetic: descartes_4348_NFATC1
gcccctattcctgtaacggt

SEQ ID NO: 8436 - DNA, 20 bp, Artificial Sequence
  Synthetic: descartes_4349_NFATC1
tcctctcccgaagaccgcag

SEQ ID NO: 8437 - DNA, 20 bp, Artificial Sequence
  Synthetic: descartes_4350_NFKB1
actagaggcaccaggtagtc

SEQ ID NO: 8438 - DNA, 20 bp, Artificial Sequence
  Synthetic: descartes_4351_NFKB1
ccaagagtcatccaggtcat

SEQ ID NO: 8439 - DNA, 20 bp, Artificial Sequence
  Synthetic: descartes_4352_NFKB1
gtagttccaggatggaaagt

SEQ ID NO: 8440 - DNA, 20 bp, Artificial Sequence
  Synthetic: descartes_4353_NFKB1
ctccgaagctggacaaacac

SEQ ID NO: 8441 - DNA, 20 bp, Artificial Sequence
  Synthetic: descartes_4354_NFKB1
ctcccctccagtcacacatc

SEQ ID NO: 8442 - DNA, 20 bp, Artificial Sequence
  Synthetic: descartes_4355_NFKB1
tgatgacattatcaacatga

SEQ ID NO: 8443 - DNA, 20 bp, Artificial Sequence
  Synthetic: descartes_4356_NFKB1
tgaccaactgaacaataacc

SEQ ID NO: 8444 - DNA, 20 bp, Artificial Sequence
  Synthetic: descartes_4357_NFKB1
gaaggagcaggactcagccg

SEQ ID NO: 8445 - DNA, 20 bp, Artificial Sequence
  Synthetic: descartes_4358_NFKB2
agttgcagaaacactgttac

SEQ ID NO: 8446 - DNA, 20 bp, Artificial Sequence
  Synthetic: descartes_4359_NFKB2
tggacccctcagcagcctca

SEQ ID NO: 8447 - DNA, 20 bp, Artificial Sequence
  Synthetic: descartes_4360_NFKB2
tgtggggcccaaggacatga

SEQ ID NO: 8448 - DNA, 20 bp, Artificial Sequence
  Synthetic: descartes_4361_NFKB2
gatatggctgtgaaggcccc

SEQ ID NO: 8449 - DNA, 20 bp, Artificial Sequence
  Synthetic: descartes_4362_NFKB2
gaatcagacacgtcccctcc

SEQ ID NO: 8450 - DNA, 20 bp, Artificial Sequence
  Synthetic: descartes_4363_NFKB2
aaatcatcatattcaataat

SEQ ID NO: 8451 - DNA, 20 bp, Artificial Sequence
  Synthetic: descartes_4364_NFKB2
tatcatagtccccatcatgt

SEQ ID NO: 8452 - DNA, 20 bp, Artificial Sequence
  Synthetic: descartes_4365_NFKB2
ttcccctcctccctggccta

SEQ ID NO: 8453 - DNA, 20 bp, Artificial Sequence
  Synthetic: descartes_4366_NFKBID
tgcacccccttcaggacccc

SEQ ID NO: 8454 - DNA, 20 bp, Artificial Sequence
  Synthetic: descartes_4367_NFKBID
gggccacagcagctgctggc

SEQ ID NO: 8455 - DNA, 20 bp, Artificial Sequence
  Synthetic: descartes_4368_NFKBID
cagcaacatgtggacacaat

SEQ ID NO: 8456 - DNA, 20 bp, Artificial Sequence
  Synthetic: descartes_4369_NFKBID
cggctcgggggctgcgctgg

SEQ ID NO: 8457 - DNA, 20 bp, Artificial Sequence
  Synthetic: descartes_4370_NFKBIZ
cctgaacacagttcaagtta

SEQ ID NO: 8458 - DNA, 20 bp, Artificial Sequence
  Synthetic: descartes_4371_NFKBIZ
ccatacctccccagtccccc

SEQ ID NO: 8459 - DNA, 20 bp, Artificial Sequence
  Synthetic: descartes_4372_NFKBIZ
ccactgtatgatactgtgtt

SEQ ID NO: 8460 - DNA, 20 bp, Artificial Sequence
  Synthetic: descartes_4373_NFKBIZ
cctaactgtgtggtgttcat

SEQ ID NO: 8461 - DNA, 20 bp, Artificial Sequence
  Synthetic: descartes_4374_NFKBIZ
agtggcaggtggagcaggaa

SEQ ID NO: 8462 - DNA, 20 bp, Artificial Sequence
  Synthetic: descartes_4375_NFKBIZ
ggttcattgagatgaacatc

SEQ ID NO: 8463 - DNA, 20 bp, Artificial Sequence
  Synthetic: descartes_4376_NFKBIZ
gcagctgaagaagcaaatct

SEQ ID NO: 8464 - DNA, 20 bp, Artificial Sequence
  Synthetic: descartes_4377_NFKBIZ
gagctgcccagttgcctgtc

SEQ ID NO: 8465 - DNA, 20 bp, Artificial Sequence
  Synthetic: descartes_4378_NLRP10
gcttcatacagggagaattc

SEQ ID NO: 8466 - DNA, 20 bp, Artificial Sequence
  Synthetic: descartes_4379_NLRP10
gagatgtccagtaaaaactg

SEQ ID NO: 8467 - DNA, 20 bp, Artificial Sequence
  Synthetic: descartes_4380_NLRP10
gatggccccaggcttgccgc

SEQ ID NO: 8468 - DNA, 20 bp, Artificial Sequence
  Synthetic: descartes_4381_NLRP10
ctgagtagtaacgactacca

SEQ ID NO: 8469 - DNA, 20 bp, Artificial Sequence
  Synthetic: descartes_4382_NLRP10
ccctgaatcaaatagagcct

SEQ ID NO: 8470 - DNA, 20 bp, Artificial Sequence
  Synthetic: descartes_4383_NLRP10
tcttgaatgatacattgttc

SEQ ID NO: 8471 - DNA, 20 bp, Artificial Sequence
  Synthetic: descartes_4384_NLRP10
gaattctccctgtatgaagc

SEQ ID NO: 8472 - DNA, 20 bp, Artificial Sequence
  Synthetic: descartes_4385_NLRP10
taggtgtctctaagacaact

SEQ ID NO: 8473 - DNA, 20 bp, Artificial Sequence
  Synthetic: descartes_4386_NLRP3
tgtgaaaaagccaagaatcc

SEQ ID NO: 8474 - DNA, 20 bp, Artificial Sequence
  Synthetic: descartes_4387_NLRP3
gaatcccactgtgatatgcc

SEQ ID NO: 8475 - DNA, 20 bp, Artificial Sequence
  Synthetic: descartes_4388_NLRP3
agtccagtgcacacgatcca

SEQ ID NO: 8476 - DNA, 20 bp, Artificial Sequence
  Synthetic: descartes_4389_NLRP3
ccaggccaaagaggaaacgt

SEQ ID NO: 8477 - DNA, 20 bp, Artificial Sequence
  Synthetic: descartes_4390_NLRP3
agatgcacttagaggactat

SEQ ID NO: 8478 - DNA, 20 bp, Artificial Sequence
  Synthetic: descartes_4391_NLRP3
ctgaggatgaacctgttcca

SEQ ID NO: 8479 - DNA, 20 bp, Artificial Sequence
  Synthetic: descartes_4392_NLRP3
actatctgttctatatccac

SEQ ID NO: 8480 - DNA, 20 bp, Artificial Sequence
  Synthetic: descartes_4393_NLRP3
ctggagtacctttcgagaat

SEQ ID NO: 8481 - DNA, 20 bp, Artificial Sequence
  Synthetic: descartes_4394_NR4A2
gcatggacctcaccaacact

SEQ ID NO: 8482 - DNA, 20 bp, Artificial Sequence
  Synthetic: descartes_4395_NR4A2
ctacaagccctcctcgcccc

SEQ ID NO: 8483 - DNA, 20 bp, Artificial Sequence
  Synthetic: descartes_4396_NR4A2
agtgttggtgaggtccatgc

SEQ ID NO: 8484 - DNA, 20 bp, Artificial Sequence
  Synthetic: descartes_4397_NR4A2
ccctcgaaaccgaagagccc

SEQ ID NO: 8485 - DNA, 20 bp, Artificial Sequence
  Synthetic: descartes_4398_NR4A2
gagggcaaacgacctctccg

SEQ ID NO: 8486 - DNA, 20 bp, Artificial Sequence
  Synthetic: descartes_4399_NR4A2
gtacaagcaaggtggcttga

SEQ ID NO: 8487 - DNA, 20 bp, Artificial Sequence
  Synthetic: descartes_4400_NR4A2
agaagtgcctggctgttggg

SEQ ID NO: 8488 - DNA, 20 bp, Artificial Sequence
  Synthetic: descartes_4401_NR4A2
tggacaactacagcacaggc

SEQ ID NO: 8489 - DNA, 20 bp, Artificial Sequence
  Synthetic: descartes_4402_NRIP1
cctggataacttcactcaat

SEQ ID NO: 8490 - DNA, 20 bp, Artificial Sequence
  Synthetic: descartes_4403_NRIP1
ggggaagaaggaatgatacc

SEQ ID NO: 8491 - DNA, 20 bp, Artificial Sequence
  Synthetic: descartes_4404_NRIP1
ctgtcagccacagagttact

SEQ ID NO: 8492 - DNA, 20 bp, Artificial Sequence
  Synthetic: descartes_4405_NRIP1
acttacctagaaggattact

SEQ ID NO: 8493 - DNA, 20 bp, Artificial Sequence
  Synthetic: descartes_4406_NRIP1
gtgccagtaagctgttacaa

SEQ ID NO: 8494 - DNA, 20 bp, Artificial Sequence
  Synthetic: descartes_4407_NRIP1
aggaaagtagtacacctaca

SEQ ID NO: 8495 - DNA, 20 bp, Artificial Sequence
  Synthetic: descartes_4408_NRIP1
agactgagtactgcagacat

SEQ ID NO: 8496 - DNA, 20 bp, Artificial Sequence
  Synthetic: descartes_4409_NRIP1
gcacaatgtggaatgcagtc

SEQ ID NO: 8497 - DNA, 20 bp, Artificial Sequence
  Synthetic: descartes_4410_NSD1
ccatgaagagtgtgtccaga

SEQ ID NO: 8498 - DNA, 20 bp, Artificial Sequence
  Synthetic: descartes_4411_NSD1
actaggagacacaaacatta

SEQ ID NO: 8499 - DNA, 20 bp, Artificial Sequence
  Synthetic: descartes_4412_NSD1
ccaggatcagattgcttaac

SEQ ID NO: 8500 - DNA, 20 bp, Artificial Sequence
  Synthetic: descartes_4413_NSD1
gatgcccctgaagacaagga

SEQ ID NO: 8501 - DNA, 20 bp, Artificial Sequence
  Synthetic: descartes_4414_NSD1
gatagaacagagaacatgtt

SEQ ID NO: 8502 - DNA, 20 bp, Artificial Sequence
  Synthetic: descartes_4415_NSD1
actgcaccgtgtctactctc

SEQ ID NO: 8503 - DNA, 20 bp, Artificial Sequence
  Synthetic: descartes_4416_NSD1
gagagagagcatcatttgta

SEQ ID NO: 8504 - DNA, 20 bp, Artificial Sequence
  Synthetic: descartes_4417_NSD1
gagggccccttggctcagtc

SEQ ID NO: 8505 - DNA, 20 bp, Artificial Sequence
  Synthetic: descartes_4418_NSD2
gatgagacagatacttcagt

SEQ ID NO: 8506 - DNA, 20 bp, Artificial Sequence
  Synthetic: descartes_4419_NSD2
ccatgaggcttgtgtgaaaa

SEQ ID NO: 8507 - DNA, 20 bp, Artificial Sequence
  Synthetic: descartes_4420_NSD2
gtgtgtaaagagagcaagac

SEQ ID NO: 8508 - DNA, 20 bp, Artificial Sequence
  Synthetic: descartes_4421_NSD2
tctgaaggacttgagatctt

SEQ ID NO: 8509 - DNA, 20 bp, Artificial Sequence
  Synthetic: descartes_4422_NSD2
acacaagcctcatggtaaaa

SEQ ID NO: 8510 - DNA, 20 bp, Artificial Sequence
  Synthetic: descartes_4423_NSD2
gcatcaagcagagtcccctt

SEQ ID NO: 8511 - DNA, 20 bp, Artificial Sequence
  Synthetic: descartes_4424_NSD2
acagaagaccaaaaactggg

SEQ ID NO: 8512 - DNA, 20 bp, Artificial Sequence
  Synthetic: descartes_4425_NSD2
gcagtcactcctcgctcaga

SEQ ID NO: 8513 - DNA, 20 bp, Artificial Sequence
  Synthetic: descartes_4426_NSD3
ccatcccctgtagcattctg

SEQ ID NO: 8514 - DNA, 20 bp, Artificial Sequence
  Synthetic: descartes_4427_NSD3
ccacaagcaccaacagaaca

SEQ ID NO: 8515 - DNA, 20 bp, Artificial Sequence
  Synthetic: descartes_4428_NSD3
ccatgatcccttgcatgaaa

SEQ ID NO: 8516 - DNA, 20 bp, Artificial Sequence
  Synthetic: descartes_4429_NSD3
gtgtaaagtgtctggtaaag

SEQ ID NO: 8517 - DNA, 20 bp, Artificial Sequence
  Synthetic: descartes_4430_NSD3
gaatgattactacagatgag

SEQ ID NO: 8518 - DNA, 20 bp, Artificial Sequence
  Synthetic: descartes_4431_NSD3
agtacccagctacaacagaa

SEQ ID NO: 8519 - DNA, 20 bp, Artificial Sequence
  Synthetic: descartes_4432_NSD3
gtgtgctcacttgcctgtac

SEQ ID NO: 8520 - DNA, 20 bp, Artificial Sequence
  Synthetic: descartes_4433_NSD3
gtatgaacctcaagctgggg

SEQ ID NO: 8521 - DNA, 20 bp, Artificial Sequence
  Synthetic: descartes_4434_OTUD7B
gctggaggagggccaccccc

SEQ ID NO: 8522 - DNA, 20 bp, Artificial Sequence
  Synthetic: descartes_4435_OTUD7B
aggggtcctggagccaccac

SEQ ID NO: 8523 - DNA, 20 bp, Artificial Sequence
  Synthetic: descartes_4436_OTUD7B
cctggcccggtcccatgtct

SEQ ID NO: 8524 - DNA, 20 bp, Artificial Sequence
  Synthetic: descartes_4437_OTUD7B
tgacagagagcctactcgcc

SEQ ID NO: 8525 - DNA, 20 bp, Artificial Sequence
  Synthetic: descartes_4438_OTUD7B
ttagccacagaatctgctct

SEQ ID NO: 8526 - DNA, 20 bp, Artificial Sequence
  Synthetic: descartes_4439_OTUD7B
gtgaggggagtggtggctcc

SEQ ID NO: 8527 - DNA, 20 bp, Artificial Sequence
  Synthetic: descartes_4440_OTUD7B
cagggtccacagcaaagtgc

SEQ ID NO: 8528 - DNA, 20 bp, Artificial Sequence
  Synthetic: descartes_4441_OTUD7B
gaggtcccagccagccagtg

SEQ ID NO: 8529 - DNA, 20 bp, Artificial Sequence
  Synthetic: descartes_4442_P2RX4
acatcatccccactatgatc

SEQ ID NO: 8530 - DNA, 20 bp, Artificial Sequence
  Synthetic: descartes_4443_P2RX4
ggataccagatgttgttctt

SEQ ID NO: 8531 - DNA, 20 bp, Artificial Sequence
  Synthetic: descartes_4444_P2RX4
gcatcataaatgcacgactt

SEQ ID NO: 8532 - DNA, 20 bp, Artificial Sequence
  Synthetic: descartes_4445_P2RX4
aaggctgcagaaaacttcac

SEQ ID NO: 8533 - DNA, 20 bp, Artificial Sequence
  Synthetic: descartes_4446_P2RX4
gcagaagtggaaatggagtc

SEQ ID NO: 8534 - DNA, 20 bp, Artificial Sequence
  Synthetic: descartes_4447_P2RX4
gttaagaacaacatctggta

SEQ ID NO: 8535 - DNA, 20 bp, Artificial Sequence
  Synthetic: descartes_4448_P2RX4
gaagtgttggtcacagccac

SEQ ID NO: 8536 - DNA, 20 bp, Artificial Sequence
  Synthetic: descartes_4449_P2RX4
ctggtagcccttttcccaca

SEQ ID NO: 8537 - DNA, 20 bp, Artificial Sequence
  Synthetic: descartes_4450_P2RX7
cgactaggagacatcttccg

SEQ ID NO: 8538 - DNA, 20 bp, Artificial Sequence
  Synthetic: descartes_4451_P2RX7
cagtatgagacgaacaaagt

SEQ ID NO: 8539 - DNA, 20 bp, Artificial Sequence
  Synthetic: descartes_4452_P2RX7
gctccacaatggactcgcac

SEQ ID NO: 8540 - DNA, 20 bp, Artificial Sequence
  Synthetic: descartes_4453_P2RX7
cgtcgccttgacgacaagac

SEQ ID NO: 8541 - DNA, 20 bp, Artificial Sequence
  Synthetic: descartes_4454_P2RX7
acctctgctatccccttcac

SEQ ID NO: 8542 - DNA, 20 bp, Artificial Sequence
  Synthetic: descartes_4455_P2RX7
tcggaagatgtctcctagtc

SEQ ID NO: 8543 - DNA, 20 bp, Artificial Sequence
  Synthetic: descartes_4456_P2RX7
ggacggcagtgatggaacca

SEQ ID NO: 8544 - DNA, 20 bp, Artificial Sequence
  Synthetic: descartes_4457_P2RX7
acattatccagctggttgtg

SEQ ID NO: 8545 - DNA, 20 bp, Artificial Sequence
  Synthetic: descartes_4458_PAG1
atacaagcagtcctccacca

SEQ ID NO: 8546 - DNA, 20 bp, Artificial Sequence
  Synthetic: descartes_4459_PAG1
cctgtgctgtcctgggaatc

SEQ ID NO: 8547 - DNA, 20 bp, Artificial Sequence
  Synthetic: descartes_4460_PAG1
caaggatactctctacatta

SEQ ID NO: 8548 - DNA, 20 bp, Artificial Sequence
  Synthetic: descartes_4461_PAG1
acagtagcatagagatcatt

SEQ ID NO: 8549 - DNA, 20 bp, Artificial Sequence
  Synthetic: descartes_4462_PAG1
agaggacagtactctgacct

SEQ ID NO: 8550 - DNA, 20 bp, Artificial Sequence
  Synthetic: descartes_4463_PAG1
attctcgtccagaagcttaa

SEQ ID NO: 8551 - DNA, 20 bp, Artificial Sequence
  Synthetic: descartes_4464_PAG1
ccttgccactgtggcctttc

SEQ ID NO: 8552 - DNA, 20 bp, Artificial Sequence
  Synthetic: descartes_4465_PAG1
actggtcgtgtctgtggcac

SEQ ID NO: 8553 - DNA, 20 bp, Artificial Sequence
  Synthetic: descartes_4466_PAK1
gctgaacctctcttctccac

SEQ ID NO: 8554 - DNA, 20 bp, Artificial Sequence
  Synthetic: descartes_4467_PAK1
cctcatgaccaggatctcat

SEQ ID NO: 8555 - DNA, 20 bp, Artificial Sequence
  Synthetic: descartes_4468_PAK1
gaggcagaggtttagaacca

SEQ ID NO: 8556 - DNA, 20 bp, Artificial Sequence
  Synthetic: descartes_4469_PAK1
gtgtcacaacctctggtgcc

SEQ ID NO: 8557 - DNA, 20 bp, Artificial Sequence
  Synthetic: descartes_4470_PAK1
acctactgaaaataacacca

SEQ ID NO: 8558 - DNA, 20 bp, Artificial Sequence
  Synthetic: descartes_4471_PAK1
agaagatgaggatgatgatg

SEQ ID NO: 8559 - DNA, 20 bp, Artificial Sequence
  Synthetic: descartes_4472_PAK1
gaaccatggtttagggttcc

SEQ ID NO: 8560 - DNA, 20 bp, Artificial Sequence
  Synthetic: descartes_4473_PAK1
attgaggtatggaggctccc

SEQ ID NO: 8561 - DNA, 20 bp, Artificial Sequence
  Synthetic: descartes_4474_PAK2
actgctactgacgttgcact

SEQ ID NO: 8562 - DNA, 20 bp, Artificial Sequence
  Synthetic: descartes_4475_PAK2
ggacatccagcacagcctga

SEQ ID NO: 8563 - DNA, 20 bp, Artificial Sequence
  Synthetic: descartes_4476_PAK2
catgctaatcaagtgatcca

SEQ ID NO: 8564 - DNA, 20 bp, Artificial Sequence
  Synthetic: descartes_4477_PAK2
attgaggtatggaggctctc

SEQ ID NO: 8565 - DNA, 20 bp, Artificial Sequence
  Synthetic: descartes_4478_PAK2
ttagggtcacctatgctcac

SEQ ID NO: 8566 - DNA, 20 bp, Artificial Sequence
  Synthetic: descartes_4479_PAK2
tgttaccacatcagtgagtg

SEQ ID NO: 8567 - DNA, 20 bp, Artificial Sequence
  Synthetic: descartes_4480_PAK2
cagaaacagccaaagaagga

SEQ ID NO: 8568 - DNA, 20 bp, Artificial Sequence
  Synthetic: descartes_4481_PAK2
ggaatggaaggatctgttaa

SEQ ID NO: 8569 - DNA, 20 bp, Artificial Sequence
  Synthetic: descartes_4482_PAK3
gagtcaccacctcaggtgcc

SEQ ID NO: 8570 - DNA, 20 bp, Artificial Sequence
  Synthetic: descartes_4483_PAK3
agtgcaggaaatccaaagct

SEQ ID NO: 8571 - DNA, 20 bp, Artificial Sequence
  Synthetic: descartes_4484_PAK3
acagagccatccatcccgag

SEQ ID NO: 8572 - DNA, 20 bp, Artificial Sequence
  Synthetic: descartes_4485_PAK3
cctcatgaccagaatttcat

SEQ ID NO: 8573 - DNA, 20 bp, Artificial Sequence
  Synthetic: descartes_4486_PAK3
gagtaatcgtgcccattgct

SEQ ID NO: 8574 - DNA, 20 bp, Artificial Sequence
  Synthetic: descartes_4487_PAK3
tcccctcctcctgggaagat

SEQ ID NO: 8575 - DNA, 20 bp, Artificial Sequence
  Synthetic: descartes_4488_PAK3
aaattagccaagcctctctc

SEQ ID NO: 8576 - DNA, 20 bp, Artificial Sequence
  Synthetic: descartes_4489_PAK3
ggtccccaacactcacaatg

SEQ ID NO: 8577 - DNA, 20 bp, Artificial Sequence
  Synthetic: descartes_4490_PAWR
aagtagcacactggaaaaga

SEQ ID NO: 8578 - DNA, 20 bp, Artificial Sequence
  Synthetic: descartes_4491_PAWR
gccttccactcctccaggaa

SEQ ID NO: 8579 - DNA, 20 bp, Artificial Sequence
  Synthetic: descartes_4492_PAWR
cagtgtgctacttgaaacca

SEQ ID NO: 8580 - DNA, 20 bp, Artificial Sequence
  Synthetic: descartes_4493_PAWR
tatctgcctgaaactgttct

SEQ ID NO: 8581 - DNA, 20 bp, Artificial Sequence
  Synthetic: descartes_4494_PAWR
aggtactctggtttcaagta

SEQ ID NO: 8582 - DNA, 20 bp, Artificial Sequence
  Synthetic: descartes_4495_PAWR
cagcttcattctgaatagtg

SEQ ID NO: 8583 - DNA, 20 bp, Artificial Sequence
  Synthetic: descartes_4496_PAWR
gctgttcattttcatcttct

SEQ ID NO: 8584 - DNA, 20 bp, Artificial Sequence
  Synthetic: descartes_4497_PAWR
aaagttgtgggtcagctgac

SEQ ID NO: 8585 - DNA, 20 bp, Artificial Sequence
  Synthetic: descartes_4498_PAXIP1
gtgggaggtggtacgtcttc

SEQ ID NO: 8586 - DNA, 20 bp, Artificial Sequence
  Synthetic: descartes_4499_PAXIP1
acctaaatccaacactgaaa

SEQ ID NO: 8587 - DNA, 20 bp, Artificial Sequence
  Synthetic: descartes_4500_PAXIP1
acagcaacagctacagtttc

SEQ ID NO: 8588 - DNA, 20 bp, Artificial Sequence
  Synthetic: descartes_4501_PAXIP1
acagcaacagcagcagcagc

SEQ ID NO: 8589 - DNA, 20 bp, Artificial Sequence
  Synthetic: descartes_4502_PAXIP1
gtaggtgctgaaagagtctg

SEQ ID NO: 8590 - DNA, 20 bp, Artificial Sequence
  Synthetic: descartes_4503_PAXIP1
ggtgaaaactgctggtcacc

SEQ ID NO: 8591 - DNA, 20 bp, Artificial Sequence
  Synthetic: descartes_4504_PAXIP1
ggtcatctctgtcactatca

SEQ ID NO: 8592 - DNA, 20 bp, Artificial Sequence
  Synthetic: descartes_4505_PAXIP1
ccagaagaatgtcgccaagc

SEQ ID NO: 8593 - DNA, 20 bp, Artificial Sequence
  Synthetic: descartes_4506_PBRM1
ggagaagccatgtcatcatc

SEQ ID NO: 8594 - DNA, 20 bp, Artificial Sequence
  Synthetic: descartes_4507_PBRM1
gcagaataccgtgattcaca

SEQ ID NO: 8595 - DNA, 20 bp, Artificial Sequence
  Synthetic: descartes_4508_PBRM1
gcttctagcaactggatctt

SEQ ID NO: 8596 - DNA, 20 bp, Artificial Sequence
  Synthetic: descartes_4509_PBRM1
agagtgactattacaacaaa

SEQ ID NO: 8597 - DNA, 20 bp, Artificial Sequence
  Synthetic: descartes_4510_PBRM1
gcactaccagtatcagaggt

SEQ ID NO: 8598 - DNA, 20 bp, Artificial Sequence
  Synthetic: descartes_4511_PBRM1
ctaacaaaccaccccttaca

SEQ ID NO: 8599 - DNA, 20 bp, Artificial Sequence
  Synthetic: descartes_4512_PBRM1
ataatgcctgtacatacaat

SEQ ID NO: 8600 - DNA, 20 bp, Artificial Sequence
  Synthetic: descartes_4513_PBRM1
ggacatgagagtcctcatct

SEQ ID NO: 8601 - DNA, 20 bp, Artificial Sequence
  Synthetic: descartes_4514_PBX3
ctcacacctcagcaacccct

SEQ ID NO: 8602 - DNA, 20 bp, Artificial Sequence
  Synthetic: descartes_4515_PBX3
gatggatgatgcccaccatt

SEQ ID NO: 8603 - DNA, 20 bp, Artificial Sequence
  Synthetic: descartes_4516_PBX3
gctctgtaatctgagtgttc

SEQ ID NO: 8604 - DNA, 20 bp, Artificial Sequence
  Synthetic: descartes_4517_PBX3
gcaacaaacgaatcaggtac

SEQ ID NO: 8605 - DNA, 20 bp, Artificial Sequence
  Synthetic: descartes_4518_PBX3
ggaggttaaaagaaccagaa

SEQ ID NO: 8606 - DNA, 20 bp, Artificial Sequence
  Synthetic: descartes_4519_PBX3
aggaagaagccaacctctat

SEQ ID NO: 8607 - DNA, 20 bp, Artificial Sequence
  Synthetic: descartes_4520_PBX3
ctccaaggccatcactgtag

SEQ ID NO: 8608 - DNA, 20 bp, Artificial Sequence
  Synthetic: descartes_4521_PBX3
gttccattcagatgcagctc

SEQ ID NO: 8609 - DNA, 20 bp, Artificial Sequence
  Synthetic: descartes_4522_PDCD1
gcacgaagctctccgatgtg

SEQ ID NO: 8610 - DNA, 20 bp, Artificial Sequence
  Synthetic: descartes_4523_PDCD1
cagtggcgagagaagacccc

SEQ ID NO: 8611 - DNA, 20 bp, Artificial Sequence
  Synthetic: descartes_4524_PDCD1
ctagcggaatgggcacctca

SEQ ID NO: 8612 - DNA, 20 bp, Artificial Sequence
  Synthetic: descartes_4525_PDCD1
gaactggccggctggcctgg

SEQ ID NO: 8613 - DNA, 20 bp, Artificial Sequence
  Synthetic: descartes_4526_PDCD1
atctgcgccttgggggccag

SEQ ID NO: 8614 - DNA, 20 bp, Artificial Sequence
  Synthetic: descartes_4527_PDCD1LG2
atagccacagtgatagccct

SEQ ID NO: 8615 - DNA, 20 bp, Artificial Sequence
  Synthetic: descartes_4528_PDCD1LG2
gccaggatacttctgccaga

SEQ ID NO: 8616 - DNA, 20 bp, Artificial Sequence
  Synthetic: descartes_4529_PDCD1LG2
ggcgcagaacactggtgacc

SEQ ID NO: 8617 - DNA, 20 bp, Artificial Sequence
  Synthetic: descartes_4530_PDCD1LG2
atccccttctgcatcattgc

SEQ ID NO: 8618 - DNA, 20 bp, Artificial Sequence
  Synthetic: descartes_4531_PDCD1LG2
ctggaggagcagctgcccct

SEQ ID NO: 8619 - DNA, 20 bp, Artificial Sequence
  Synthetic: descartes_4532_PDCD1LG2
caaaaggtggaaaatgatac

SEQ ID NO: 8620 - DNA, 20 bp, Artificial Sequence
  Synthetic: descartes_4533_PDCD1LG2
agagtcaggtacttgtagtc

SEQ ID NO: 8621 - DNA, 20 bp, Artificial Sequence
  Synthetic: descartes_4534_PDCD1LG2
ttagggctatcactgtggct

SEQ ID NO: 8622 - DNA, 20 bp, Artificial Sequence
  Synthetic: descartes_4535_PDE4B
aatgtagcttgagtaaatcc

SEQ ID NO: 8623 - DNA, 20 bp, Artificial Sequence
  Synthetic: descartes_4536_PDE4B
ggagatgtaggtctgtttcc

SEQ ID NO: 8624 - DNA, 20 bp, Artificial Sequence
  Synthetic: descartes_4537_PDE4B
gagtcaacactgaaaatgaa

SEQ ID NO: 8625 - DNA, 20 bp, Artificial Sequence
  Synthetic: descartes_4538_PDE4B
tctacagatcagacagcgac

SEQ ID NO: 8626 - DNA, 20 bp, Artificial Sequence
  Synthetic: descartes_4539_PDE4B
gtacagcctgatgctcagga

SEQ ID NO: 8627 - DNA, 20 bp, Artificial Sequence
  Synthetic: descartes_4540_PDE4B
ggcttgaactatgcattaat

SEQ ID NO: 8628 - DNA, 20 bp, Artificial Sequence
  Synthetic: descartes_4541_PDE4B
cattcccctctcccgctctt

SEQ ID NO: 8629 - DNA, 20 bp, Artificial Sequence
  Synthetic: descartes_4542_PDE4B
ctgagcaacaccttctccct

SEQ ID NO: 8630 - DNA, 20 bp, Artificial Sequence
  Synthetic: descartes_4543_PDE4D
actccaaaccttgggatact

SEQ ID NO: 8631 - DNA, 20 bp, Artificial Sequence
  Synthetic: descartes_4544_PDE4D
gaggaagatggtgagtcaga

SEQ ID NO: 8632 - DNA, 20 bp, Artificial Sequence
  Synthetic: descartes_4545_PDE4D
gagttaaaactgaacaagaa

SEQ ID NO: 8633 - DNA, 20 bp, Artificial Sequence
  Synthetic: descartes_4546_PDE4D
agtagactctgagtcttgag

SEQ ID NO: 8634 - DNA, 20 bp, Artificial Sequence
  Synthetic: descartes_4547_PDE4D
tcccaagctctctccagtga

SEQ ID NO: 8635 - DNA, 20 bp, Artificial Sequence
  Synthetic: descartes_4548_PDE4D
agaatagcagagttgtctgg

SEQ ID NO: 8636 - DNA, 20 bp, Artificial Sequence
  Synthetic: descartes_4549_PDE4D
ccagtgcaatacatgatgta

SEQ ID NO: 8637 - DNA, 20 bp, Artificial Sequence
  Synthetic: descartes_4550_PDE4D
acagtacctgaagtggataa

SEQ ID NO: 8638 - DNA, 20 bp, Artificial Sequence
  Synthetic: descartes_4551_PDE5A
gctacagacctagcactgta

SEQ ID NO: 8639 - DNA, 20 bp, Artificial Sequence
  Synthetic: descartes_4552_PDE5A
acatggagtgtgaggaatta

SEQ ID NO: 8640 - DNA, 20 bp, Artificial Sequence
  Synthetic: descartes_4553_PDE5A
aaataactgtatccgcttag

SEQ ID NO: 8641 - DNA, 20 bp, Artificial Sequence
  Synthetic: descartes_4554_PDE5A
agtaaatgtcccaccgtttc

SEQ ID NO: 8642 - DNA, 20 bp, Artificial Sequence
  Synthetic: descartes_4555_PDE5A
ctgagagagttcacaccatc

SEQ ID NO: 8643 - DNA, 20 bp, Artificial Sequence
  Synthetic: descartes_4556_PDE5A
gaagatcctcatcaaaagga

SEQ ID NO: 8644 - DNA, 20 bp, Artificial Sequence
  Synthetic: descartes_4557_PDE5A
acatactgagcatacatgta

SEQ ID NO: 8645 - DNA, 20 bp, Artificial Sequence
  Synthetic: descartes_4558_PDE5A
ttgcatatccatggactgat

SEQ ID NO: 8646 - DNA, 20 bp, Artificial Sequence
  Synthetic: descartes_4559_PDPK1
gaggcagcgataccagagcc

SEQ ID NO: 8647 - DNA, 20 bp, Artificial Sequence
  Synthetic: descartes_4560_PDPK1
agaggtccgtatccttccat

SEQ ID NO: 8648 - DNA, 20 bp, Artificial Sequence
  Synthetic: descartes_4561_PDPK1
gctgcatgcaggtgtcttcg

SEQ ID NO: 8649 - DNA, 20 bp, Artificial Sequence
  Synthetic: descartes_4562_PDPK1
gatgccacaaagcggttagg

SEQ ID NO: 8650 - DNA, 20 bp, Artificial Sequence
  Synthetic: descartes_4563_PDPK1
tccagagctgctcacggaga

SEQ ID NO: 8651 - DNA, 20 bp, Artificial Sequence
  Synthetic: descartes_4564_PDPK1
cgccagcctgcttctccaac

SEQ ID NO: 8652 - DNA, 20 bp, Artificial Sequence
  Synthetic: descartes_4565_PDPK1
ctcacagcctaaccgctttg

SEQ ID NO: 8653 - DNA, 20 bp, Artificial Sequence
  Synthetic: descartes_4566_PDPK1
cgaagatgagaagaggttgt

SEQ ID NO: 8654 - DNA, 20 bp, Artificial Sequence
  Synthetic: descartes_4567_PELI1
cctgcagaatcatatgtgaa

SEQ ID NO: 8655 - DNA, 20 bp, Artificial Sequence
  Synthetic: descartes_4568_PELI1
acgtaggctaaatacatttc

SEQ ID NO: 8656 - DNA, 20 bp, Artificial Sequence
  Synthetic: descartes_4569_PELI1
tcctgatcaagaaaatcatc

SEQ ID NO: 8657 - DNA, 20 bp, Artificial Sequence
  Synthetic: descartes_4570_PELI1
gatatacccatggttgtttt

SEQ ID NO: 8658 - DNA, 20 bp, Artificial Sequence
  Synthetic: descartes_4571_PELI1
ctagtatgaagaggaaagac

SEQ ID NO: 8659 - DNA, 20 bp, Artificial Sequence
  Synthetic: descartes_4572_PELI1
atgagtcaaatcctgcagca

SEQ ID NO: 8660 - DNA, 20 bp, Artificial Sequence
  Synthetic: descartes_4573_PELI1
tgtggacgccggccctccaa

SEQ ID NO: 8661 - DNA, 20 bp, Artificial Sequence
  Synthetic: descartes_4574_PELI1
ctctctgctgagccgatctg

SEQ ID NO: 8662 - DNA, 20 bp, Artificial Sequence
  Synthetic: descartes_4575_PENK
agagaaggcagtttaccttc

SEQ ID NO: 8663 - DNA, 20 bp, Artificial Sequence
  Synthetic: descartes_4576_PENK
ccttcacattccattacgca

SEQ ID NO: 8664 - DNA, 20 bp, Artificial Sequence
  Synthetic: descartes_4577_PENK
tggtagtccatccaccactc

SEQ ID NO: 8665 - DNA, 20 bp, Artificial Sequence
  Synthetic: descartes_4578_PENK
atgaagcccccatacctttt

SEQ ID NO: 8666 - DNA, 20 bp, Artificial Sequence
  Synthetic: descartes_4579_PENK
ttcatgaagcctccatacct

SEQ ID NO: 8667 - DNA, 20 bp, Artificial Sequence
  Synthetic: descartes_4580_PENK
tctgagggtgctggtgccat

SEQ ID NO: 8668 - DNA, 20 bp, Artificial Sequence
  Synthetic: descartes_4581_PENK
gcaggtctgaggaattggcc

SEQ ID NO: 8669 - DNA, 20 bp, Artificial Sequence
  Synthetic: descartes_4582_PENK
ggaaacctgcaaggagctcc

SEQ ID NO: 8670 - DNA, 20 bp, Artificial Sequence
  Synthetic: descartes_4583_PHF1
agacacccccaaaggagaac

SEQ ID NO: 8671 - DNA, 20 bp, Artificial Sequence
  Synthetic: descartes_4584_PHF1
cccttctgcctcctcctcag

SEQ ID NO: 8672 - DNA, 20 bp, Artificial Sequence
  Synthetic: descartes_4585_PHF1
cttccttccacccttctgcc

SEQ ID NO: 8673 - DNA, 20 bp, Artificial Sequence
  Synthetic: descartes_4586_PHF1
cccacagacatccctaaaag

SEQ ID NO: 8674 - DNA, 20 bp, Artificial Sequence
  Synthetic: descartes_4587_PHF1
gggatgtctgtggggaaacc

SEQ ID NO: 8675 - DNA, 20 bp, Artificial Sequence
  Synthetic: descartes_4588_PHF1
atttcagggagagagattaa

SEQ ID NO: 8676 - DNA, 20 bp, Artificial Sequence
  Synthetic: descartes_4589_PHF1
agggagagagattaagaaga

SEQ ID NO: 8677 - DNA, 20 bp, Artificial Sequence
  Synthetic: descartes_4590_PHF1
ctcttcttaatctctctccc

SEQ ID NO: 8678 - DNA, 20 bp, Artificial Sequence
  Synthetic: descartes_4591_PHF10
gttactatccagcagaaaac

SEQ ID NO: 8679 - DNA, 20 bp, Artificial Sequence
  Synthetic: descartes_4592_PHF10
aaggaggtcacacccaaata

SEQ ID NO: 8680 - DNA, 20 bp, Artificial Sequence
  Synthetic: descartes_4593_PHF10
gctctctcaggtagagtttc

SEQ ID NO: 8681 - DNA, 20 bp, Artificial Sequence
  Synthetic: descartes_4594_PHF10
tcatcacctcgaccatcttc

SEQ ID NO: 8682 - DNA, 20 bp, Artificial Sequence
  Synthetic: descartes_4595_PHF10
cagggaagacagaaatcaaa

SEQ ID NO: 8683 - DNA, 20 bp, Artificial Sequence
  Synthetic: descartes_4596_PHF10
acaactcctagaactatctc

SEQ ID NO: 8684 - DNA, 20 bp, Artificial Sequence
  Synthetic: descartes_4597_PHF10
ttgtagaataacagaatact

SEQ ID NO: 8685 - DNA, 20 bp, Artificial Sequence
  Synthetic: descartes_4598_PHF10
atgataaaagaatatccagc

SEQ ID NO: 8686 - DNA, 20 bp, Artificial Sequence
  Synthetic: descartes_4599_PHF11
actgtagattgttcgaagac

SEQ ID NO: 8687 - DNA, 20 bp, Artificial Sequence
  Synthetic: descartes_4600_PHF11
atgtggaatcagtaaagaaa

SEQ ID NO: 8688 - DNA, 20 bp, Artificial Sequence
  Synthetic: descartes_4601_PHF11
agtcctgaagtagctcaatc

SEQ ID NO: 8689 - DNA, 20 bp, Artificial Sequence
  Synthetic: descartes_4602_PHF11
tgtgccaagaaggacgacgc

SEQ ID NO: 8690 - DNA, 20 bp, Artificial Sequence
  Synthetic: descartes_4603_PHF11
aggagtgaaaagaaaaagag

SEQ ID NO: 8691 - DNA, 20 bp, Artificial Sequence
  Synthetic: descartes_4604_PHF11
ccagcaacatgctcaattcc

SEQ ID NO: 8692 - DNA, 20 bp, Artificial Sequence
  Synthetic: descartes_4605_PHF11
caaatgtgtcttcgaacaat

SEQ ID NO: 8693 - DNA, 20 bp, Artificial Sequence
  Synthetic: descartes_4606_PHF11
ctgattccacatcaaaactt

SEQ ID NO: 8694 - DNA, 20 bp, Artificial Sequence
  Synthetic: descartes_4607_PHF12
agttgcccaatgaactgact

SEQ ID NO: 8695 - DNA, 20 bp, Artificial Sequence
  Synthetic: descartes_4608_PHF12
tgaagagagcaggaacaaga

SEQ ID NO: 8696 - DNA, 20 bp, Artificial Sequence
  Synthetic: descartes_4609_PHF12
gtcgcaaactcagtgatgct

SEQ ID NO: 8697 - DNA, 20 bp, Artificial Sequence
  Synthetic: descartes_4610_PHF12
ccctcccgggtccaaccttc

SEQ ID NO: 8698 - DNA, 20 bp, Artificial Sequence
  Synthetic: descartes_4611_PHF12
cctgtggtttcctcctttct

SEQ ID NO: 8699 - DNA, 20 bp, Artificial Sequence
  Synthetic: descartes_4612_PHF12
gttcctgtcccaagcctgcc

SEQ ID NO: 8700 - DNA, 20 bp, Artificial Sequence
  Synthetic: descartes_4613_PHF12
cagggaggtggtgactgagc

SEQ ID NO: 8701 - DNA, 20 bp, Artificial Sequence
  Synthetic: descartes_4614_PHF12
ggggtgagcccagtggcctt

SEQ ID NO: 8702 - DNA, 20 bp, Artificial Sequence
  Synthetic: descartes_4615_PHF13
gcacaggacaggtgaatcca

SEQ ID NO: 8703 - DNA, 20 bp, Artificial Sequence
  Synthetic: descartes_4616_PHF13
gcagacaaacacttctggaa

SEQ ID NO: 8704 - DNA, 20 bp, Artificial Sequence
  Synthetic: descartes_4617_PHF13
cctgccggacgatagtccgt

SEQ ID NO: 8705 - DNA, 20 bp, Artificial Sequence
  Synthetic: descartes_4618_PHF13
gccacctgcagcctactctc

SEQ ID NO: 8706 - DNA, 20 bp, Artificial Sequence
  Synthetic: descartes_4619_PHF13
tgtccagcaggaagttactg

SEQ ID NO: 8707 - DNA, 20 bp, Artificial Sequence
  Synthetic: descartes_4620_PHF13
acatccgccgttccaaccgc

SEQ ID NO: 8708 - DNA, 20 bp, Artificial Sequence
  Synthetic: descartes_4621_PHF13
aggagcagccccagccctgc

SEQ ID NO: 8709 - DNA, 20 bp, Artificial Sequence
  Synthetic: descartes_4622_PHF13
ccaggcgcatcactgtccct

SEQ ID NO: 8710 - DNA, 20 bp, Artificial Sequence
  Synthetic: descartes_4623_PHF14
gaagaagaactgaatgaaga

SEQ ID NO: 8711 - DNA, 20 bp, Artificial Sequence
  Synthetic: descartes_4624_PHF14
caggtatcacacaataaaag

SEQ ID NO: 8712 - DNA, 20 bp, Artificial Sequence
  Synthetic: descartes_4625_PHF14
tccttccatccacactagaa

SEQ ID NO: 8713 - DNA, 20 bp, Artificial Sequence
  Synthetic: descartes_4626_PHF14
attgtctccagttcccttgc

SEQ ID NO: 8714 - DNA, 20 bp, Artificial Sequence
  Synthetic: descartes_4627_PHF14
cgagcacccaaggagagaaa

SEQ ID NO: 8715 - DNA, 20 bp, Artificial Sequence
  Synthetic: descartes_4628_PHF14
caataggactgtagagccaa

SEQ ID NO: 8716 - DNA, 20 bp, Artificial Sequence
  Synthetic: descartes_4629_PHF14
catgtgacctgtgctcaaaa

SEQ ID NO: 8717 - DNA, 20 bp, Artificial Sequence
  Synthetic: descartes_4630_PHF14
cgaatagctgaagcactgct

SEQ ID NO: 8718 - DNA, 20 bp, Artificial Sequence
  Synthetic: descartes_4631_PHF19
agagcatcagtgaagatgac

SEQ ID NO: 8719 - DNA, 20 bp, Artificial Sequence
  Synthetic: descartes_4632_PHF19
atccagcgtgaagtcaaata

SEQ ID NO: 8720 - DNA, 20 bp, Artificial Sequence
  Synthetic: descartes_4633_PHF19
gagacagatagcgcctctgc

SEQ ID NO: 8721 - DNA, 20 bp, Artificial Sequence
  Synthetic: descartes_4634_PHF19
acttcacgctggatgaaatt

SEQ ID NO: 8722 - DNA, 20 bp, Artificial Sequence
  Synthetic: descartes_4635_PHF19
gcagcagtcctttgtcaggc

SEQ ID NO: 8723 - DNA, 20 bp, Artificial Sequence
  Synthetic: descartes_4636_PHF19
cctgttcttctgctccgtgt

SEQ ID NO: 8724 - DNA, 20 bp, Artificial Sequence
  Synthetic: descartes_4637_PHF19
cccgcaggggcatgtatgcc

SEQ ID NO: 8725 - DNA, 20 bp, Artificial Sequence
  Synthetic: descartes_4638_PHF19
gaattatcttcgaaagtcac

SEQ ID NO: 8726 - DNA, 20 bp, Artificial Sequence
  Synthetic: descartes_4639_PHF2
cctgcactcttgccactgcc

SEQ ID NO: 8727 - DNA, 20 bp, Artificial Sequence
  Synthetic: descartes_4640_PHF2
ccatcaggaggaagaaaaac

SEQ ID NO: 8728 - DNA, 20 bp, Artificial Sequence
  Synthetic: descartes_4641_PHF2
cccctcactggagtcagatg

SEQ ID NO: 8729 - DNA, 20 bp, Artificial Sequence
  Synthetic: descartes_4642_PHF2
cagctagaggcgacttctct

SEQ ID NO: 8730 - DNA, 20 bp, Artificial Sequence
  Synthetic: descartes_4643_PHF2
ggcttggccagcaatgcatc

SEQ ID NO: 8731 - DNA, 20 bp, Artificial Sequence
  Synthetic: descartes_4644_PHF2
gatggcttgggcatcttcac

SEQ ID NO: 8732 - DNA, 20 bp, Artificial Sequence
  Synthetic: descartes_4645_PHF2
aacctcctttccacttcata

SEQ ID NO: 8733 - DNA, 20 bp, Artificial Sequence
  Synthetic: descartes_4646_PHF2
ctccacagcctgagtgtgga

SEQ ID NO: 8734 - DNA, 20 bp, Artificial Sequence
  Synthetic: descartes_4647_PHF20
ggcctagcattacccacaat

SEQ ID NO: 8735 - DNA, 20 bp, Artificial Sequence
  Synthetic: descartes_4648_PHF20
gatgcaaagttgtggactgt

SEQ ID NO: 8736 - DNA, 20 bp, Artificial Sequence
  Synthetic: descartes_4649_PHF20
gttgatacggatcctttgca

SEQ ID NO: 8737 - DNA, 20 bp, Artificial Sequence
  Synthetic: descartes_4650_PHF20
ctcctggacctcacagatgc

SEQ ID NO: 8738 - DNA, 20 bp, Artificial Sequence
  Synthetic: descartes_4651_PHF20
cccggccaaagtcactgctg

SEQ ID NO: 8739 - DNA, 20 bp, Artificial Sequence
  Synthetic: descartes_4652_PHF20
acagtctgaactactccatc

SEQ ID NO: 8740 - DNA, 20 bp, Artificial Sequence
  Synthetic: descartes_4653_PHF20
catggaatggagaagtcact

SEQ ID NO: 8741 - DNA, 20 bp, Artificial Sequence
  Synthetic: descartes_4654_PHF20
atgggacttcacatcctttt

SEQ ID NO: 8742 - DNA, 20 bp, Artificial Sequence
  Synthetic: descartes_4655_PHF20L1
gaggcactggactacttaca

SEQ ID NO: 8743 - DNA, 20 bp, Artificial Sequence
  Synthetic: descartes_4656_PHF20L1
acctaaacctcaaagtcaga

SEQ ID NO: 8744 - DNA, 20 bp, Artificial Sequence
  Synthetic: descartes_4657_PHF20L1
gaagaagaacaagaattcca

SEQ ID NO: 8745 - DNA, 20 bp, Artificial Sequence
  Synthetic: descartes_4658_PHF20L1
ctgggatagcaatagattgc

SEQ ID NO: 8746 - DNA, 20 bp, Artificial Sequence
  Synthetic: descartes_4659_PHF20L1
actagatgtaggcagatctt

SEQ ID NO: 8747 - DNA, 20 bp, Artificial Sequence
  Synthetic: descartes_4660_PHF20L1
acaggggagttggagccacc

SEQ ID NO: 8748 - DNA, 20 bp, Artificial Sequence
  Synthetic: descartes_4661_PHF20L1
cagtactcagcaaaagaaca

SEQ ID NO: 8749 - DNA, 20 bp, Artificial Sequence
  Synthetic: descartes_4662_PHF20L1
ggggcaaacgaggtggttct

SEQ ID NO: 8750 - DNA, 20 bp, Artificial Sequence
  Synthetic: descartes_4663_PHF21A
ggtatgtcactgcactcttc

SEQ ID NO: 8751 - DNA, 20 bp, Artificial Sequence
  Synthetic: descartes_4664_PHF21A
cctgcacctgttcagcctgt

SEQ ID NO: 8752 - DNA, 20 bp, Artificial Sequence
  Synthetic: descartes_4665_PHF21A
agaggggggtctaagcagtc

SEQ ID NO: 8753 - DNA, 20 bp, Artificial Sequence
  Synthetic: descartes_4666_PHF21A
ccttctccagggagctgtgc

SEQ ID NO: 8754 - DNA, 20 bp, Artificial Sequence
  Synthetic: descartes_4667_PHF21A
aaacaagaacgagaacaact

SEQ ID NO: 8755 - DNA, 20 bp, Artificial Sequence
  Synthetic: descartes_4668_PHF21A
gctatggttgcagtctgccc

SEQ ID NO: 8756 - DNA, 20 bp, Artificial Sequence
  Synthetic: descartes_4669_PHF21A
ggtgcagcaggtggggtgat

SEQ ID NO: 8757 - DNA, 20 bp, Artificial Sequence
  Synthetic: descartes_4670_PHF21A
tcccccctcctagactcact

SEQ ID NO: 8758 - DNA, 20 bp, Artificial Sequence
  Synthetic: descartes_4671_PHF21B
gtggcctgagctccctgaga

SEQ ID NO: 8759 - DNA, 20 bp, Artificial Sequence
  Synthetic: descartes_4672_PHF21B
ggaacgatcactgcagtgcc

SEQ ID NO: 8760 - DNA, 20 bp, Artificial Sequence
  Synthetic: descartes_4673_PHF21B
atgctgtcactgaccacaga

SEQ ID NO: 8761 - DNA, 20 bp, Artificial Sequence
  Synthetic: descartes_4674_PHF21B
gtggagctgcttcttgaggt

SEQ ID NO: 8762 - DNA, 20 bp, Artificial Sequence
  Synthetic: descartes_4675_PHF21B
tcgctgagcgcggcgatccg

SEQ ID NO: 8763 - DNA, 20 bp, Artificial Sequence
  Synthetic: descartes_4676_PHF23
agtgctgcccacctccttgc

SEQ ID NO: 8764 - DNA, 20 bp, Artificial Sequence
  Synthetic: descartes_4677_PHF23
ccagggggacctctcccatc

SEQ ID NO: 8765 - DNA, 20 bp, Artificial Sequence
  Synthetic: descartes_4678_PHF23
gcatatgctggttacattcc

SEQ ID NO: 8766 - DNA, 20 bp, Artificial Sequence
  Synthetic: descartes_4679_PHF23
ggaggcccccctaaccgccg

SEQ ID NO: 8767 - DNA, 20 bp, Artificial Sequence
  Synthetic: descartes_4680_PHF23
ggcccatccagatcaaagag

SEQ ID NO: 8768 - DNA, 20 bp, Artificial Sequence
  Synthetic: descartes_4681_PHF23
actgtcagcaggagggactc

SEQ ID NO: 8769 - DNA, 20 bp, Artificial Sequence
  Synthetic: descartes_4682_PHF23
cccatccccaggagttggcc

SEQ ID NO: 8770 - DNA, 20 bp, Artificial Sequence
  Synthetic: descartes_4683_PHF23
ctagggggaatgtaaccagc

SEQ ID NO: 8771 - DNA, 20 bp, Artificial Sequence
  Synthetic: descartes_4684_PHF3
actacagctcacattaccat

SEQ ID NO: 8772 - DNA, 20 bp, Artificial Sequence
  Synthetic: descartes_4685_PHF3
aatgagcagaccaactcaaa

SEQ ID NO: 8773 - DNA, 20 bp, Artificial Sequence
  Synthetic: descartes_4686_PHF3
agataaagaagaacatgaac

SEQ ID NO: 8774 - DNA, 20 bp, Artificial Sequence
  Synthetic: descartes_4687_PHF3
agtgacatacatacttcttc

SEQ ID NO: 8775 - DNA, 20 bp, Artificial Sequence
  Synthetic: descartes_4688_PHF3
gcagtagatacagtcttccc

SEQ ID NO: 8776 - DNA, 20 bp, Artificial Sequence
  Synthetic: descartes_4689_PHF3
cctcggagatcctcagaaga

SEQ ID NO: 8777 - DNA, 20 bp, Artificial Sequence
  Synthetic: descartes_4690_PHF3
ataggccagtcaaagtcaga

SEQ ID NO: 8778 - DNA, 20 bp, Artificial Sequence
  Synthetic: descartes_4691_PHF3
gggacacagatgctaaatat

SEQ ID NO: 8779 - DNA, 20 bp, Artificial Sequence
  Synthetic: descartes_4692_PHF6
atatcaaagtctccaaattc

SEQ ID NO: 8780 - DNA, 20 bp, Artificial Sequence
  Synthetic: descartes_4693_PHF6
gtatcatcacactctgataa

SEQ ID NO: 8781 - DNA, 20 bp, Artificial Sequence
  Synthetic: descartes_4694_PHF6
aagggctgtcagaagatacc

SEQ ID NO: 8782 - DNA, 20 bp, Artificial Sequence
  Synthetic: descartes_4695_PHF6
acatcacaaccaattgttgc

SEQ ID NO: 8783 - DNA, 20 bp, Artificial Sequence
  Synthetic: descartes_4696_PHF6
ggtgatgagggctccagttc

SEQ ID NO: 8784 - DNA, 20 bp, Artificial Sequence
  Synthetic: descartes_4697_PHF6
gagtacatcccaaatttatc

SEQ ID NO: 8785 - DNA, 20 bp, Artificial Sequence
  Synthetic: descartes_4698_PHF6
agatattagtaactgtccac

SEQ ID NO: 8786 - DNA, 20 bp, Artificial Sequence
  Synthetic: descartes_4699_PHF6
ttcctcccctacatggcaaa

SEQ ID NO: 8787 - DNA, 20 bp, Artificial Sequence
  Synthetic: descartes_4700_PHF7
gggatccccaggttctcgaa

SEQ ID NO: 8788 - DNA, 20 bp, Artificial Sequence
  Synthetic: descartes_4701_PHF7
tgcagagacaacaccttgga

SEQ ID NO: 8789 - DNA, 20 bp, Artificial Sequence
  Synthetic: descartes_4702_PHF7
ctctgggttaccctcctagt

SEQ ID NO: 8790 - DNA, 20 bp, Artificial Sequence
  Synthetic: descartes_4703_PHF7
tgaggcactgatccttctgg

SEQ ID NO: 8791 - DNA, 20 bp, Artificial Sequence
  Synthetic: descartes_4704_PHF7
tgacaaacatcgcccaacac

SEQ ID NO: 8792 - DNA, 20 bp, Artificial Sequence
  Synthetic: descartes_4705_PHF7
atgtcttcaggcagaaatcc

SEQ ID NO: 8793 - DNA, 20 bp, Artificial Sequence
  Synthetic: descartes_4706_PHF7
gattgttacactgtggacat

SEQ ID NO: 8794 - DNA, 20 bp, Artificial Sequence
  Synthetic: descartes_4707_PHF7
ctcccccacatgcccatgtt

SEQ ID NO: 8795 - DNA, 20 bp, Artificial Sequence
  Synthetic: descartes_4708_PHF8
gctgcagcagctgcaaagct

SEQ ID NO: 8796 - DNA, 20 bp, Artificial Sequence
  Synthetic: descartes_4709_PHF8
gtggcacctctgtctggtac

SEQ ID NO: 8797 - DNA, 20 bp, Artificial Sequence
  Synthetic: descartes_4710_PHF8
gagggcagtgacagcctgga

SEQ ID NO: 8798 - DNA, 20 bp, Artificial Sequence
  Synthetic: descartes_4711_PHF8
cctgggccatgccaaaggca

SEQ ID NO: 8799 - DNA, 20 bp, Artificial Sequence
  Synthetic: descartes_4712_PHF8
ggactccatggagcatcatc

SEQ ID NO: 8800 - DNA, 20 bp, Artificial Sequence
  Synthetic: descartes_4713_PHF8
gacccatgacagctttcgaa

SEQ ID NO: 8801 - DNA, 20 bp, Artificial Sequence
  Synthetic: descartes_4714_PHF8
ccacataccaacagatggtc

SEQ ID NO: 8802 - DNA, 20 bp, Artificial Sequence
  Synthetic: descartes_4715_PHF8
cccttgtgtgtatcatgccc

SEQ ID NO: 8803 - DNA, 20 bp, Artificial Sequence
  Synthetic: descartes_4716_PHIP
ccagtatcaggatctagaaa

SEQ ID NO: 8804 - DNA, 20 bp, Artificial Sequence
  Synthetic: descartes_4717_PHIP
ataaaagaaataccataacc

SEQ ID NO: 8805 - DNA, 20 bp, Artificial Sequence
  Synthetic: descartes_4718_PHIP
cctggtattgcagatgcatt

SEQ ID NO: 8806 - DNA, 20 bp, Artificial Sequence
  Synthetic: descartes_4719_PHIP
cttccaggtcccctcttcac

SEQ ID NO: 8807 - DNA, 20 bp, Artificial Sequence
  Synthetic: descartes_4720_PHIP
aaggaagctgaatgggaaat

SEQ ID NO: 8808 - DNA, 20 bp, Artificial Sequence
  Synthetic: descartes_4721_PHIP
tctggctgacctgatccaaa

SEQ ID NO: 8809 - DNA, 20 bp, Artificial Sequence
  Synthetic: descartes_4722_PHIP
acattagaagaatggttgcc

SEQ ID NO: 8810 - DNA, 20 bp, Artificial Sequence
  Synthetic: descartes_4723_PHIP
gtcatggcactaggaataat

SEQ ID NO: 8811 - DNA, 20 bp, Artificial Sequence
  Synthetic: descartes_4724_PHRF1
ccctgagtacccgctacctc

SEQ ID NO: 8812 - DNA, 20 bp, Artificial Sequence
  Synthetic: descartes_4725_PHRF1
ccaccaaattgagctcgaat

SEQ ID NO: 8813 - DNA, 20 bp, Artificial Sequence
  Synthetic: descartes_4726_PHRF1
agtgcatttgtattcgagct

SEQ ID NO: 8814 - DNA, 20 bp, Artificial Sequence
  Synthetic: descartes_4727_PHRF1
aattctgatgatgatgcaga

SEQ ID NO: 8815 - DNA, 20 bp, Artificial Sequence
  Synthetic: descartes_4728_PHRF1
ttgtgcctgcgcatgtgcct

SEQ ID NO: 8816 - DNA, 20 bp, Artificial Sequence
  Synthetic: descartes_4729_PHRF1
ccagtcacgtgcttccggaa

SEQ ID NO: 8817 - DNA, 20 bp, Artificial Sequence
  Synthetic: descartes_4730_PHRF1
tccgcagctagcctgggggc

SEQ ID NO: 8818 - DNA, 20 bp, Artificial Sequence
  Synthetic: descartes_4731_PHRF1
cagccccggcctgccgcctg

SEQ ID NO: 8819 - DNA, 20 bp, Artificial Sequence
  Synthetic: descartes_4732_PIK3CA
gaggatagacatacattgct

SEQ ID NO: 8820 - DNA, 20 bp, Artificial Sequence
  Synthetic: descartes_4733_PIK3CA
gcaccacctcaataagtccc

SEQ ID NO: 8821 - DNA, 20 bp, Artificial Sequence
  Synthetic: descartes_4734_PIK3CA
agagtatacttctgcttgtc

SEQ ID NO: 8822 - DNA, 20 bp, Artificial Sequence
  Synthetic: descartes_4735_PIK3CA
gaggagacagaaagccctgt

SEQ ID NO: 8823 - DNA, 20 bp, Artificial Sequence
  Synthetic: descartes_4736_PIK3CA
gtaagtgttactcaagaagc

SEQ ID NO: 8824 - DNA, 20 bp, Artificial Sequence
  Synthetic: descartes_4737_PIK3CA
caagcaccgaacagcaaaac

SEQ ID NO: 8825 - DNA, 20 bp, Artificial Sequence
  Synthetic: descartes_4738_PIK3CA
gtagtaaacattctactagg

SEQ ID NO: 8826 - DNA, 20 bp, Artificial Sequence
  Synthetic: descartes_4739_PIK3CA
gttgagcaaatgaggcgacc

SEQ ID NO: 8827 - DNA, 20 bp, Artificial Sequence
  Synthetic: descartes_4740_PIK3CB
cctgatacctctgagcttac

SEQ ID NO: 8828 - DNA, 20 bp, Artificial Sequence
  Synthetic: descartes_4741_PIK3CB
gtgtcatccttgaagcatac

SEQ ID NO: 8829 - DNA, 20 bp, Artificial Sequence
  Synthetic: descartes_4742_PIK3CB
agaggtgctcacaacttcaa

SEQ ID NO: 8830 - DNA, 20 bp, Artificial Sequence
  Synthetic: descartes_4743_PIK3CB
ccacaatcactgccaaaatt

SEQ ID NO: 8831 - DNA, 20 bp, Artificial Sequence
  Synthetic: descartes_4744_PIK3CB
gataaagtaaaaacgaagaa

SEQ ID NO: 8832 - DNA, 20 bp, Artificial Sequence
  Synthetic: descartes_4745_PIK3CB
gtgatcatccactaattcag

SEQ ID NO: 8833 - DNA, 20 bp, Artificial Sequence
  Synthetic: descartes_4746_PIK3CB
atggtactgagctcctgtgt

SEQ ID NO: 8834 - DNA, 20 bp, Artificial Sequence
  Synthetic: descartes_4747_PIK3CB
ccttaaccaagacaatttgg

SEQ ID NO: 8835 - DNA, 20 bp, Artificial Sequence
  Synthetic: descartes_4748_PIK3CD
actacaaggaccagcttaag

SEQ ID NO: 8836 - DNA, 20 bp, Artificial Sequence
  Synthetic: descartes_4749_PIK3CD
cccctgcagctggagccctc

SEQ ID NO: 8837 - DNA, 20 bp, Artificial Sequence
  Synthetic: descartes_4750_PIK3CD
gaatcaaccgcgagcgtgtc

SEQ ID NO: 8838 - DNA, 20 bp, Artificial Sequence
  Synthetic: descartes_4751_PIK3CD
acgaagccctccgtgagagc

SEQ ID NO: 8839 - DNA, 20 bp, Artificial Sequence
  Synthetic: descartes_4752_PIK3CD
agccgagggctccagctgca

SEQ ID NO: 8840 - DNA, 20 bp, Artificial Sequence
  Synthetic: descartes_4753_PIK3CD
actccttgtgcgacccagaa

SEQ ID NO: 8841 - DNA, 20 bp, Artificial Sequence
  Synthetic: descartes_4754_PIK3CD
gtcagctcgcagtccaggta

SEQ ID NO: 8842 - DNA, 20 bp, Artificial Sequence
  Synthetic: descartes_4755_PIK3CD
gcgccaagatgtgccaattc

SEQ ID NO: 8843 - DNA, 20 bp, Artificial Sequence
  Synthetic: descartes_4756_PIK3CG
actgaactaaatagcttagg

SEQ ID NO: 8844 - DNA, 20 bp, Artificial Sequence
  Synthetic: descartes_4757_PIK3CG
atctgagaagttgcagtcca

SEQ ID NO: 8845 - DNA, 20 bp, Artificial Sequence
  Synthetic: descartes_4758_PIK3CG
tgctaacccctgacttcctc

SEQ ID NO: 8846 - DNA, 20 bp, Artificial Sequence
  Synthetic: descartes_4759_PIK3CG
aatgtgccgatcctacagcc

SEQ ID NO: 8847 - DNA, 20 bp, Artificial Sequence
  Synthetic: descartes_4760_PIK3CG
gatacgaaagccttaagcac

SEQ ID NO: 8848 - DNA, 20 bp, Artificial Sequence
  Synthetic: descartes_4761_PIK3CG
tgtgatgacgaagggctaga

SEQ ID NO: 8849 - DNA, 20 bp, Artificial Sequence
  Synthetic: descartes_4762_PIK3CG
gtatctaaaatgccagagca

SEQ ID NO: 8850 - DNA, 20 bp, Artificial Sequence
  Synthetic: descartes_4763_PIK3CG
gcccaccaggtactcatccc

SEQ ID NO: 8851 - DNA, 20 bp, Artificial Sequence
  Synthetic: descartes_4764_PIK3R1
gaatatgccaagacagatat

SEQ ID NO: 8852 - DNA, 20 bp, Artificial Sequence
  Synthetic: descartes_4765_PIK3R1
gtagacgcatctcgtaccaa

SEQ ID NO: 8853 - DNA, 20 bp, Artificial Sequence
  Synthetic: descartes_4766_PIK3R1
cctacagcttcaatattatc

SEQ ID NO: 8854 - DNA, 20 bp, Artificial Sequence
  Synthetic: descartes_4767_PIK3R1
gtacgagatgcgtctactaa

SEQ ID NO: 8855 - DNA, 20 bp, Artificial Sequence
  Synthetic: descartes_4768_PIK3R1
gaagaacctggtgcaacagg

SEQ ID NO: 8856 - DNA, 20 bp, Artificial Sequence
  Synthetic: descartes_4769_PIK3R1
ggattatactgagctagaga

SEQ ID NO: 8857 - DNA, 20 bp, Artificial Sequence
  Synthetic: descartes_4770_PIK3R1
atctcaactgaatggaatga

SEQ ID NO: 8858 - DNA, 20 bp, Artificial Sequence
  Synthetic: descartes_4771_PIK3R1
gctgacgctttcaaacgcta

SEQ ID NO: 8859 - DNA, 20 bp, Artificial Sequence
  Synthetic: descartes_4772_PIK3R2
atccccagccactcgttgat

SEQ ID NO: 8860 - DNA, 20 bp, Artificial Sequence
  Synthetic: descartes_4773_PIK3R2
tcttgagtctggccctgctc

SEQ ID NO: 8861 - DNA, 20 bp, Artificial Sequence
  Synthetic: descartes_4774_PIK3R2
tgaagagtacacacggacct

SEQ ID NO: 8862 - DNA, 20 bp, Artificial Sequence
  Synthetic: descartes_4775_PIK3R2
aatggcctccacaagcttca

SEQ ID NO: 8863 - DNA, 20 bp, Artificial Sequence
  Synthetic: descartes_4776_PIK3R2
gacacagggtagaggagccg

SEQ ID NO: 8864 - DNA, 20 bp, Artificial Sequence
  Synthetic: descartes_4777_PIK3R2
aagagcagggccagactcaa

SEQ ID NO: 8865 - DNA, 20 bp, Artificial Sequence
  Synthetic: descartes_4778_PIK3R2
ccttggggggtttaggcggc

SEQ ID NO: 8866 - DNA, 20 bp, Artificial Sequence
  Synthetic: descartes_4779_PIK3R2
tcgttgccctcacgccggaa

SEQ ID NO: 8867 - DNA, 20 bp, Artificial Sequence
  Synthetic: descartes_4780_PKN1
ttcacgaacacaagatcgtc

SEQ ID NO: 8868 - DNA, 20 bp, Artificial Sequence
  Synthetic: descartes_4781_PKN1
cagacaccggagcacgtgtg

SEQ ID NO: 8869 - DNA, 20 bp, Artificial Sequence
  Synthetic: descartes_4782_PKN1
ccgccacgcactacagcacc

SEQ ID NO: 8870 - DNA, 20 bp, Artificial Sequence
  Synthetic: descartes_4783_PKN1
gccctggggcttctccagga

SEQ ID NO: 8871 - DNA, 20 bp, Artificial Sequence
  Synthetic: descartes_4784_PKN1
ttcacatcttctgcatctct

SEQ ID NO: 8872 - DNA, 20 bp, Artificial Sequence
  Synthetic: descartes_4785_PKN1
agggcacacaggccccgctg

SEQ ID NO: 8873 - DNA, 20 bp, Artificial Sequence
  Synthetic: descartes_4786_PKN1
ccgccgcagccgctcccgct

SEQ ID NO: 8874 - DNA, 20 bp, Artificial Sequence
  Synthetic: descartes_4787_PKN1
ctcctggacaccgagggcta

SEQ ID NO: 8875 - DNA, 20 bp, Artificial Sequence
  Synthetic: descartes_4788_PLCG1
atgggaaccacagctgcttc

SEQ ID NO: 8876 - DNA, 20 bp, Artificial Sequence
  Synthetic: descartes_4789_PLCG1
ctgggaaagtagcctgagcc

SEQ ID NO: 8877 - DNA, 20 bp, Artificial Sequence
  Synthetic: descartes_4790_PLCG1
ccatgggcacacccttacca

SEQ ID NO: 8878 - DNA, 20 bp, Artificial Sequence
  Synthetic: descartes_4791_PLCG1
acccagtcctgcagctcctc

SEQ ID NO: 8879 - DNA, 20 bp, Artificial Sequence
  Synthetic: descartes_4792_PLCG1
cctctacatagaagccaggg

SEQ ID NO: 8880 - DNA, 20 bp, Artificial Sequence
  Synthetic: descartes_4793_PLCG1
cgggaaggatgacatgtccc

SEQ ID NO: 8881 - DNA, 20 bp, Artificial Sequence
  Synthetic: descartes_4794_PLCG1
agagcctgtcccacagacca

SEQ ID NO: 8882 - DNA, 20 bp, Artificial Sequence
  Synthetic: descartes_4795_PLCG1
gcctgaaaacgctgagcctg

SEQ ID NO: 8883 - DNA, 20 bp, Artificial Sequence
  Synthetic: descartes_4796_PLCG2
actgggatccacatacattc

SEQ ID NO: 8884 - DNA, 20 bp, Artificial Sequence
  Synthetic: descartes_4797_PLCG2
cctgcatgacttccagaggt

SEQ ID NO: 8885 - DNA, 20 bp, Artificial Sequence
  Synthetic: descartes_4798_PLCG2
agagcatccgagagatcacc

SEQ ID NO: 8886 - DNA, 20 bp, Artificial Sequence
  Synthetic: descartes_4799_PLCG2
aagccagagagccagttaac

SEQ ID NO: 8887 - DNA, 20 bp, Artificial Sequence
  Synthetic: descartes_4800_PLCG2
gggagaaatggttccacaag

SEQ ID NO: 8888 - DNA, 20 bp, Artificial Sequence
  Synthetic: descartes_4801_PLCG2
tgtatgacacacaccagaac

SEQ ID NO: 8889 - DNA, 20 bp, Artificial Sequence
  Synthetic: descartes_4802_PLCG2
acgagaaaacagcatctggg

SEQ ID NO: 8890 - DNA, 20 bp, Artificial Sequence
  Synthetic: descartes_4803_PLCG2
aagtgagcagtgccaagttc

SEQ ID NO: 8891 - DNA, 20 bp, Artificial Sequence
  Synthetic: descartes_4804_PLSCR1
ccaaccacacactgttcatc

SEQ ID NO: 8892 - DNA, 20 bp, Artificial Sequence
  Synthetic: descartes_4805_PLSCR1
gggtacagcaatcagtatct

SEQ ID NO: 8893 - DNA, 20 bp, Artificial Sequence
  Synthetic: descartes_4806_PLSCR1
ccttgaggattattgataat

SEQ ID NO: 8894 - DNA, 20 bp, Artificial Sequence
  Synthetic: descartes_4807_PLSCR1
atggaggctgtggcgctggc

SEQ ID NO: 8895 - DNA, 20 bp, Artificial Sequence
  Synthetic: descartes_4808_PLSCR1
ctgatgaatcagtatctgat

SEQ ID NO: 8896 - DNA, 20 bp, Artificial Sequence
  Synthetic: descartes_4809_PLSCR1
ctgtcccaaatcagccagtg

SEQ ID NO: 8897 - DNA, 20 bp, Artificial Sequence
  Synthetic: descartes_4810_PLSCR1
acatcaaggtctaaagggaa

SEQ ID NO: 8898 - DNA, 20 bp, Artificial Sequence
  Synthetic: descartes_4811_PLSCR1
agagaggcatttacagacgc

SEQ ID NO: 8899 - DNA, 20 bp, Artificial Sequence
  Synthetic: descartes_4812_PNP
agtggtcagaaccctctcag

SEQ ID NO: 8900 - DNA, 20 bp, Artificial Sequence
  Synthetic: descartes_4813_PNP
cctgccatgtctgatgccta

SEQ ID NO: 8901 - DNA, 20 bp, Artificial Sequence
  Synthetic: descartes_4814_PNP
gcttctcactcatcactaac

SEQ ID NO: 8902 - DNA, 20 bp, Artificial Sequence
  Synthetic: descartes_4815_PNP
tcagtcagacctcctaatcc

SEQ ID NO: 8903 - DNA, 20 bp, Artificial Sequence
  Synthetic: descartes_4816_PNP
ccagctgctaagacttcttc

SEQ ID NO: 8904 - DNA, 20 bp, Artificial Sequence
  Synthetic: descartes_4817_PNP
aggttggagatatcatgctg

SEQ ID NO: 8905 - DNA, 20 bp, Artificial Sequence
  Synthetic: descartes_4818_PNP
ataatccatgatgaccttgt

SEQ ID NO: 8906 - DNA, 20 bp, Artificial Sequence
  Synthetic: descartes_4819_PNP
actacggtgaaatccccaac

SEQ ID NO: 8907 - DNA, 20 bp, Artificial Sequence
  Synthetic: descartes_4820_POU2F2
ctgaggtagctggaatagat

SEQ ID NO: 8908 - DNA, 20 bp, Artificial Sequence
  Synthetic: descartes_4821_POU2F2
tctcgatgctggtcctcttc

SEQ ID NO: 8909 - DNA, 20 bp, Artificial Sequence
  Synthetic: descartes_4822_POU2F2
ccgcttcgaggccctcaacc

SEQ ID NO: 8910 - DNA, 20 bp, Artificial Sequence
  Synthetic: descartes_4823_POU2F2
tccttctggcgccggttgca

SEQ ID NO: 8911 - DNA, 20 bp, Artificial Sequence
  Synthetic: descartes_4824_POU2F2
gacggcctgcccggccggag

SEQ ID NO: 8912 - DNA, 20 bp, Artificial Sequence
  Synthetic: descartes_4825_POU2F2
gggggctgcgggtgcgagag

SEQ ID NO: 8913 - DNA, 20 bp, Artificial Sequence
  Synthetic: descartes_4826_POU2F2
cacatgttcttgaagctcag

SEQ ID NO: 8914 - DNA, 20 bp, Artificial Sequence
  Synthetic: descartes_4827_POU2F2
tactggggccagttggggac

SEQ ID NO: 8915 - DNA, 20 bp, Artificial Sequence
  Synthetic: descartes_4828_PPM1B
agagcagaagaggatgaatt

SEQ ID NO: 8916 - DNA, 20 bp, Artificial Sequence
  Synthetic: descartes_4829_PPM1B
cctgagagcttccaccaatt

SEQ ID NO: 8917 - DNA, 20 bp, Artificial Sequence
  Synthetic: descartes_4830_PPM1B
gataaacccaaaactgaaaa

SEQ ID NO: 8918 - DNA, 20 bp, Artificial Sequence
  Synthetic: descartes_4831_PPM1B
acctaagcatatctacttta

SEQ ID NO: 8919 - DNA, 20 bp, Artificial Sequence
  Synthetic: descartes_4832_PPM1B
ggtttatccaaaaatgcacc

SEQ ID NO: 8920 - DNA, 20 bp, Artificial Sequence
  Synthetic: descartes_4833_PPM1B
cctgtgatccactttcctct

SEQ ID NO: 8921 - DNA, 20 bp, Artificial Sequence
  Synthetic: descartes_4834_PPM1B
cactgaaagctcaagagcag

SEQ ID NO: 8922 - DNA, 20 bp, Artificial Sequence
  Synthetic: descartes_4835_PPM1B
tctatgtggattcagtctac

SEQ ID NO: 8923 - DNA, 20 bp, Artificial Sequence
  Synthetic: descartes_4836_PPP3CB
cccccaacacatcgcttgac

SEQ ID NO: 8924 - DNA, 20 bp, Artificial Sequence
  Synthetic: descartes_4837_PPP3CB
aagtaggaggatcacctgct

SEQ ID NO: 8925 - DNA, 20 bp, Artificial Sequence
  Synthetic: descartes_4838_PPP3CB
actgttctccacatccttac

SEQ ID NO: 8926 - DNA, 20 bp, Artificial Sequence
  Synthetic: descartes_4839_PPP3CB
gatgggatacccagggttga

SEQ ID NO: 8927 - DNA, 20 bp, Artificial Sequence
  Synthetic: descartes_4840_PPP3CB
gataggatcaatgagagaat

SEQ ID NO: 8928 - DNA, 20 bp, Artificial Sequence
  Synthetic: descartes_4841_PPP3CB
gtcacaatacagttcgagga

SEQ ID NO: 8929 - DNA, 20 bp, Artificial Sequence
  Synthetic: descartes_4842_PPP3CB
accagaaatacacacactgg

SEQ ID NO: 8930 - DNA, 20 bp, Artificial Sequence
  Synthetic: descartes_4843_PPP3CB
tggtgaaagtccaccatgaa

SEQ ID NO: 8931 - DNA, 20 bp, Artificial Sequence
  Synthetic: descartes_4844_PRDM1
gcagcaccagcaatctcaag

SEQ ID NO: 8932 - DNA, 20 bp, Artificial Sequence
  Synthetic: descartes_4845_PRDM1
aagagaagtgtacatacatt

SEQ ID NO: 8933 - DNA, 20 bp, Artificial Sequence
  Synthetic: descartes_4846_PRDM1
atggtccccttggtcccctc

SEQ ID NO: 8934 - DNA, 20 bp, Artificial Sequence
  Synthetic: descartes_4847_PRDM1
aagtatgccaccaacagtga

SEQ ID NO: 8935 - DNA, 20 bp, Artificial Sequence
  Synthetic: descartes_4848_PRDM1
ggctcctaccctggctacgc

SEQ ID NO: 8936 - DNA, 20 bp, Artificial Sequence
  Synthetic: descartes_4849_PRDM1
gacccctaataggtgaaatc

SEQ ID NO: 8937 - DNA, 20 bp, Artificial Sequence
  Synthetic: descartes_4850_PRDM1
cttctccactacagagatca

SEQ ID NO: 8938 - DNA, 20 bp, Artificial Sequence
  Synthetic: descartes_4851_PRDM1
aggtgaaccttgaggctaca

SEQ ID NO: 8939 - DNA, 20 bp, Artificial Sequence
  Synthetic: descartes_4852_PRDM10
ccggaaggccttcccacact

SEQ ID NO: 8940 - DNA, 20 bp, Artificial Sequence
  Synthetic: descartes_4853_PRDM10
catgaagacctatggtttga

SEQ ID NO: 8941 - DNA, 20 bp, Artificial Sequence
  Synthetic: descartes_4854_PRDM10
gtgatatgcacttcgctgct

SEQ ID NO: 8942 - DNA, 20 bp, Artificial Sequence
  Synthetic: descartes_4855_PRDM10
atgaggctgaaccagccact

SEQ ID NO: 8943 - DNA, 20 bp, Artificial Sequence
  Synthetic: descartes_4856_PRDM10
gctggtgatttccaggcgga

SEQ ID NO: 8944 - DNA, 20 bp, Artificial Sequence
  Synthetic: descartes_4857_PRDM10
actacagacagcgccactgg

SEQ ID NO: 8945 - DNA, 20 bp, Artificial Sequence
  Synthetic: descartes_4858_PRDM10
cccaggcctcattgccagtt

SEQ ID NO: 8946 - DNA, 20 bp, Artificial Sequence
  Synthetic: descartes_4859_PRDM10
cagaccccggccaggtagct

SEQ ID NO: 8947 - DNA, 20 bp, Artificial Sequence
  Synthetic: descartes_4860_PRDM11
ccctaactgtattcgcctaa

SEQ ID NO: 8948 - DNA, 20 bp, Artificial Sequence
  Synthetic: descartes_4861_PRDM11
gtgtagtaatcagccttgag

SEQ ID NO: 8949 - DNA, 20 bp, Artificial Sequence
  Synthetic: descartes_4862_PRDM11
agattcacaccatcaaactt

SEQ ID NO: 8950 - DNA, 20 bp, Artificial Sequence
  Synthetic: descartes_4863_PRDM11
ccagacttaagcatgtctaa

SEQ ID NO: 8951 - DNA, 20 bp, Artificial Sequence
  Synthetic: descartes_4864_PRDM11
aggagaagtctgggaacagt

SEQ ID NO: 8952 - DNA, 20 bp, Artificial Sequence
  Synthetic: descartes_4865_PRDM11
ccctgtctcagcacagagag

SEQ ID NO: 8953 - DNA, 20 bp, Artificial Sequence
  Synthetic: descartes_4866_PRDM11
ctgggacatgctgtgcaggc

SEQ ID NO: 8954 - DNA, 20 bp, Artificial Sequence
  Synthetic: descartes_4867_PRDM11
ctgatgaccagtgaggtgct

SEQ ID NO: 8955 - DNA, 20 bp, Artificial Sequence
  Synthetic: descartes_4868_PRDM13
gataccccaacagccttaag

SEQ ID NO: 8956 - DNA, 20 bp, Artificial Sequence
  Synthetic: descartes_4869_PRDM13
gggagagaccgaggccatca

SEQ ID NO: 8957 - DNA, 20 bp, Artificial Sequence
  Synthetic: descartes_4870_PRDM13
gccgcgccttcccaggcagg

SEQ ID NO: 8958 - DNA, 20 bp, Artificial Sequence
  Synthetic: descartes_4871_PRDM13
tggctgcccggattaaccct

SEQ ID NO: 8959 - DNA, 20 bp, Artificial Sequence
  Synthetic: descartes_4872_PRDM13
gcgagcagactctggccagg

SEQ ID NO: 8960 - DNA, 20 bp, Artificial Sequence
  Synthetic: descartes_4873_PRDM13
agcgggtaataagcggtggt

SEQ ID NO: 8961 - DNA, 20 bp, Artificial Sequence
  Synthetic: descartes_4874_PRDM13
ttaggcccgggctccctgcg

SEQ ID NO: 8962 - DNA, 20 bp, Artificial Sequence
  Synthetic: descartes_4875_PRDM13
cagtctacaacggggagctg

SEQ ID NO: 8963 - DNA, 20 bp, Artificial Sequence
  Synthetic: descartes_4876_PRDM14
cctacaaatattacagagat

SEQ ID NO: 8964 - DNA, 20 bp, Artificial Sequence
  Synthetic: descartes_4877_PRDM14
ggaccatcctctgactgctt

SEQ ID NO: 8965 - DNA, 20 bp, Artificial Sequence
  Synthetic: descartes_4878_PRDM14
tcatagcagtctccatacca

SEQ ID NO: 8966 - DNA, 20 bp, Artificial Sequence
  Synthetic: descartes_4879_PRDM14
cctgttctctctgcaaacga

SEQ ID NO: 8967 - DNA, 20 bp, Artificial Sequence
  Synthetic: descartes_4880_PRDM14
tgagagctgcaaagagatcc

SEQ ID NO: 8968 - DNA, 20 bp, Artificial Sequence
  Synthetic: descartes_4881_PRDM14
ccacagatgctgcatgagca

SEQ ID NO: 8969 - DNA, 20 bp, Artificial Sequence
  Synthetic: descartes_4882_PRDM14
ccttgaaagggcccaaacct

SEQ ID NO: 8970 - DNA, 20 bp, Artificial Sequence
  Synthetic: descartes_4883_PRDM14
ctatcgcccttgtccacaca

SEQ ID NO: 8971 - DNA, 20 bp, Artificial Sequence
  Synthetic: descartes_4884_PRDM15
ctgggggaaccaggaaaatc

SEQ ID NO: 8972 - DNA, 20 bp, Artificial Sequence
  Synthetic: descartes_4885_PRDM15
cctgtgaggtctgcagcaag

SEQ ID NO: 8973 - DNA, 20 bp, Artificial Sequence
  Synthetic: descartes_4886_PRDM15
ccagtgcaatatctgcagca

SEQ ID NO: 8974 - DNA, 20 bp, Artificial Sequence
  Synthetic: descartes_4887_PRDM15
agtgcgaagagtgtgcaaaa

SEQ ID NO: 8975 - DNA, 20 bp, Artificial Sequence
  Synthetic: descartes_4888_PRDM15
ctggttcccccaggaaaagt

SEQ ID NO: 8976 - DNA, 20 bp, Artificial Sequence
  Synthetic: descartes_4889_PRDM15
gcgaccctcctggactcaaa

SEQ ID NO: 8977 - DNA, 20 bp, Artificial Sequence
  Synthetic: descartes_4890_PRDM15
gccgaagggaagcacgggaa

SEQ ID NO: 8978 - DNA, 20 bp, Artificial Sequence
  Synthetic: descartes_4891_PRDM15
ttccgaggagatcccgatct

SEQ ID NO: 8979 - DNA, 20 bp, Artificial Sequence
  Synthetic: descartes_4892_PRDM16
gacgagaaagaagactctta

SEQ ID NO: 8980 - DNA, 20 bp, Artificial Sequence
  Synthetic: descartes_4893_PRDM16
ctataaagtcattaaggaca

SEQ ID NO: 8981 - DNA, 20 bp, Artificial Sequence
  Synthetic: descartes_4894_PRDM16
cgagaaataagagtcttctt

SEQ ID NO: 8982 - DNA, 20 bp, Artificial Sequence
  Synthetic: descartes_4895_PRDM16
ggaaggggctggacctccgc

SEQ ID NO: 8983 - DNA, 20 bp, Artificial Sequence
  Synthetic: descartes_4896_PRDM16
catccacgcagaacttctca

SEQ ID NO: 8984 - DNA, 20 bp, Artificial Sequence
  Synthetic: descartes_4897_PRDM16
atctcaccaccaagcccaaa

SEQ ID NO: 8985 - DNA, 20 bp, Artificial Sequence
  Synthetic: descartes_4898_PRDM16
acttcaaatgcttcctcagc

SEQ ID NO: 8986 - DNA, 20 bp, Artificial Sequence
  Synthetic: descartes_4899_PRDM16
gctagcttcctcgccctcgc

SEQ ID NO: 8987 - DNA, 20 bp, Artificial Sequence
  Synthetic: descartes_4900_PRDM2
cctgtagaaaaccctgcaga

SEQ ID NO: 8988 - DNA, 20 bp, Artificial Sequence
  Synthetic: descartes_4901_PRDM2
cctgcccctactgttgagtc

SEQ ID NO: 8989 - DNA, 20 bp, Artificial Sequence
  Synthetic: descartes_4902_PRDM2
actacacacaatattccaca

SEQ ID NO: 8990 - DNA, 20 bp, Artificial Sequence
  Synthetic: descartes_4903_PRDM2
accgaagctgcaaacttgac

SEQ ID NO: 8991 - DNA, 20 bp, Artificial Sequence
  Synthetic: descartes_4904_PRDM2
caaacagaacacacaaagat

SEQ ID NO: 8992 - DNA, 20 bp, Artificial Sequence
  Synthetic: descartes_4905_PRDM2
tctgggagagatgagagaga

SEQ ID NO: 8993 - DNA, 20 bp, Artificial Sequence
  Synthetic: descartes_4906_PRDM2
ccttctctggatcagtggca

SEQ ID NO: 8994 - DNA, 20 bp, Artificial Sequence
  Synthetic: descartes_4907_PRDM2
gttgtaaacttcctttcaca

SEQ ID NO: 8995 - DNA, 20 bp, Artificial Sequence
  Synthetic: descartes_4908_PRDM4
gctgacagaccacctccaca

SEQ ID NO: 8996 - DNA, 20 bp, Artificial Sequence
  Synthetic: descartes_4909_PRDM4
aggtaacccacacatcaccc

SEQ ID NO: 8997 - DNA, 20 bp, Artificial Sequence
  Synthetic: descartes_4910_PRDM4
catcatgaggataagccacc

SEQ ID NO: 8998 - DNA, 20 bp, Artificial Sequence
  Synthetic: descartes_4911_PRDM4
gtgatcccagcaacctgcgg

SEQ ID NO: 8999 - DNA, 20 bp, Artificial Sequence
  Synthetic: descartes_4912_PRDM4
tgtgcagaaagagactcatc

SEQ ID NO: 9000 - DNA, 20 bp, Artificial Sequence
  Synthetic: descartes_4913_PRDM4
cagtgaaggtgatacaaaag

SEQ ID NO: 9001 - DNA, 20 bp, Artificial Sequence
  Synthetic: descartes_4914_PRDM4
gaaggagagataaaagcttg

SEQ ID NO: 9002 - DNA, 20 bp, Artificial Sequence
  Synthetic: descartes_4915_PRDM4
gtggcttatcctcatgatgg

SEQ ID NO: 9003 - DNA, 20 bp, Artificial Sequence
  Synthetic: descartes_4916_PRDM5
gctgattagctgaaataaat

SEQ ID NO: 9004 - DNA, 20 bp, Artificial Sequence
  Synthetic: descartes_4917_PRDM5
gatgctaccaacccacggca

SEQ ID NO: 9005 - DNA, 20 bp, Artificial Sequence
  Synthetic: descartes_4918_PRDM5
caaggaatgactacctcaaa

SEQ ID NO: 9006 - DNA, 20 bp, Artificial Sequence
  Synthetic: descartes_4919_PRDM5
agaggaaggatacattaaat

SEQ ID NO: 9007 - DNA, 20 bp, Artificial Sequence
  Synthetic: descartes_4920_PRDM5
ccagcagtggtacactcaga

SEQ ID NO: 9008 - DNA, 20 bp, Artificial Sequence
  Synthetic: descartes_4921_PRDM5
ccataagaagtttacaagga

SEQ ID NO: 9009 - DNA, 20 bp, Artificial Sequence
  Synthetic: descartes_4922_PRDM5
cagagacacctgctaataca

SEQ ID NO: 9010 - DNA, 20 bp, Artificial Sequence
  Synthetic: descartes_4923_PRDM5
gcctgaagaaaatgctgatt

SEQ ID NO: 9011 - DNA, 20 bp, Artificial Sequence
  Synthetic: descartes_4924_PRDM6
ccggggccaccaccctcaac

SEQ ID NO: 9012 - DNA, 20 bp, Artificial Sequence
  Synthetic: descartes_4925_PRDM6
atcctgggcaatgcattgta

SEQ ID NO: 9013 - DNA, 20 bp, Artificial Sequence
  Synthetic: descartes_4926_PRDM6
ggatccccttacaatgcatt

SEQ ID NO: 9014 - DNA, 20 bp, Artificial Sequence
  Synthetic: descartes_4927_PRDM6
ccccagactccgtgcagcag

SEQ ID NO: 9015 - DNA, 20 bp, Artificial Sequence
  Synthetic: descartes_4928_PRDM6
ccagccttcagaactgagga

SEQ ID NO: 9016 - DNA, 20 bp, Artificial Sequence
  Synthetic: descartes_4929_PRDM6
caaagatgccagtcactgaa

SEQ ID NO: 9017 - DNA, 20 bp, Artificial Sequence
  Synthetic: descartes_4930_PRDM6
acccagcggatcctcttaca

SEQ ID NO: 9018 - DNA, 20 bp, Artificial Sequence
  Synthetic: descartes_4931_PRDM6
atcaaatcaacgtgaaaaac

SEQ ID NO: 9019 - DNA, 20 bp, Artificial Sequence
  Synthetic: descartes_4932_PRDM7
gtctagagtgctgtccagag

SEQ ID NO: 9020 - DNA, 20 bp, Artificial Sequence
  Synthetic: descartes_4933_PRDM7
acttgaaaaggccagacagc

SEQ ID NO: 9021 - DNA, 20 bp, Artificial Sequence
  Synthetic: descartes_4934_PRDM7
tgagcctgctctgagtcact

SEQ ID NO: 9022 - DNA, 20 bp, Artificial Sequence
  Synthetic: descartes_4935_PRDM7
ctgaatacaagtgactcaga

SEQ ID NO: 9023 - DNA, 20 bp, Artificial Sequence
  Synthetic: descartes_4936_PRDM7
catccacatactcatagcag

SEQ ID NO: 9024 - DNA, 20 bp, Artificial Sequence
  Synthetic: descartes_4937_PRDM7
catatacttcaccaaggaag

SEQ ID NO: 9025 - DNA, 20 bp, Artificial Sequence
  Synthetic: descartes_4938_PRDM7
acattcctatagcgagtttt

SEQ ID NO: 9026 - DNA, 20 bp, Artificial Sequence
  Synthetic: descartes_4939_PRDM7
atggcctgccttcggtgaca

SEQ ID NO: 9027 - DNA, 20 bp, Artificial Sequence
  Synthetic: descartes_4940_PRDM8
gtacgggaaagaactgactg

SEQ ID NO: 9028 - DNA, 20 bp, Artificial Sequence
  Synthetic: descartes_4941_PRDM8
cgctgccccaagagacttca

SEQ ID NO: 9029 - DNA, 20 bp, Artificial Sequence
  Synthetic: descartes_4942_PRDM8
ccgtaccaaactagtaactc

SEQ ID NO: 9030 - DNA, 20 bp, Artificial Sequence
  Synthetic: descartes_4943_PRDM8
ccagcgtttacaccacctgc

SEQ ID NO: 9031 - DNA, 20 bp, Artificial Sequence
  Synthetic: descartes_4944_PRDM8
atagctctcaagtctactga

SEQ ID NO: 9032 - DNA, 20 bp, Artificial Sequence
  Synthetic: descartes_4945_PRDM8
tcctctcgccgccgcttcac

SEQ ID NO: 9033 - DNA, 20 bp, Artificial Sequence
  Synthetic: descartes_4946_PRDM8
agttcccctatgtggcgcat

SEQ ID NO: 9034 - DNA, 20 bp, Artificial Sequence
  Synthetic: descartes_4947_PRDM8
gtccctgtgtcctgagccat

SEQ ID NO: 9035 - DNA, 20 bp, Artificial Sequence
  Synthetic: descartes_4948_PRDM9
gctggaagtcacacctcctc

SEQ ID NO: 9036 - DNA, 20 bp, Artificial Sequence
  Synthetic: descartes_4949_PRDM9
cctgtgttccctggattcac

SEQ ID NO: 9037 - DNA, 20 bp, Artificial Sequence
  Synthetic: descartes_4950_PRDM9
gctggcagtcagtcctcctc

SEQ ID NO: 9038 - DNA, 20 bp, Artificial Sequence
  Synthetic: descartes_4951_PRDM9
gtcttgagtgctgtccagag

SEQ ID NO: 9039 - DNA, 20 bp, Artificial Sequence
  Synthetic: descartes_4952_PRDM9
gcaataagtcacacctcctc

SEQ ID NO: 9040 - DNA, 20 bp, Artificial Sequence
  Synthetic: descartes_4953_PRDM9
gagataagtcaaacctcctc

SEQ ID NO: 9041 - DNA, 20 bp, Artificial Sequence
  Synthetic: descartes_4954_PRDM9
gcgataagtcacacctcctc

SEQ ID NO: 9042 - DNA, 20 bp, Artificial Sequence
  Synthetic: descartes_4955_PRDM9
agtgttaaatcagatgttat

SEQ ID NO: 9043 - DNA, 20 bp, Artificial Sequence
  Synthetic: descartes_4956_PRF1
ctggaggctcccccagaagc

SEQ ID NO: 9044 - DNA, 20 bp, Artificial Sequence
  Synthetic: descartes_4957_PRF1
gtggaaggaggccgtcatct

SEQ ID NO: 9045 - DNA, 20 bp, Artificial Sequence
  Synthetic: descartes_4958_PRF1
catgtggtacacactccccc

SEQ ID NO: 9046 - DNA, 20 bp, Artificial Sequence
  Synthetic: descartes_4959_PRF1
ggtggccatgattcaggttg

SEQ ID NO: 9047 - DNA, 20 bp, Artificial Sequence
  Synthetic: descartes_4960_PRF1
acagagggtgcaggtgccgt

SEQ ID NO: 9048 - DNA, 20 bp, Artificial Sequence
  Synthetic: descartes_4961_PRF1
cccaggctgagtactgctcg

SEQ ID NO: 9049 - DNA, 20 bp, Artificial Sequence
  Synthetic: descartes_4962_PRF1
gggatgtgctcctggccaca

SEQ ID NO: 9050 - DNA, 20 bp, Artificial Sequence
  Synthetic: descartes_4963_PRF1
ggggacatagtccaggcagg

SEQ ID NO: 9051 - DNA, 20 bp, Artificial Sequence
  Synthetic: descartes_4964_PRKAR1A
gccaaagccattgaaaagaa

SEQ ID NO: 9052 - DNA, 20 bp, Artificial Sequence
  Synthetic: descartes_4965_PRKAR1A
tcctcctccacccaacccag

SEQ ID NO: 9053 - DNA, 20 bp, Artificial Sequence
  Synthetic: descartes_4966_PRKAR1A
tgaccgacgttgtagcacag

SEQ ID NO: 9054 - DNA, 20 bp, Artificial Sequence
  Synthetic: descartes_4967_PRKAR1A
gtttgaggatgtctgagcat

SEQ ID NO: 9055 - DNA, 20 bp, Artificial Sequence
  Synthetic: descartes_4968_PRKAR1A
gctaaagcggccattgtctt

SEQ ID NO: 9056 - DNA, 20 bp, Artificial Sequence
  Synthetic: descartes_4969_PRKAR1A
acatcttgatgataatgaga

SEQ ID NO: 9057 - DNA, 20 bp, Artificial Sequence
  Synthetic: descartes_4970_PRKAR1A
ctaaggaattcctcatacat

SEQ ID NO: 9058 - DNA, 20 bp, Artificial Sequence
  Synthetic: descartes_4971_PRKAR1A
aagatgggcagaagattgtg

SEQ ID NO: 9059 - DNA, 20 bp, Artificial Sequence
  Synthetic: descartes_4972_PRKAR1B
gcgcggcaaaagtcaaactc

SEQ ID NO: 9060 - DNA, 20 bp, Artificial Sequence
  Synthetic: descartes_4973_PRKAR1B
tctccatcttcaaactggac

SEQ ID NO: 9061 - DNA, 20 bp, Artificial Sequence
  Synthetic: descartes_4974_PRKAR1B
aagatggagagaaaattgtg

SEQ ID NO: 9062 - DNA, 20 bp, Artificial Sequence
  Synthetic: descartes_4975_PRKAR1B
ccgcgccaaaatctgcctgt

SEQ ID NO: 9063 - DNA, 20 bp, Artificial Sequence
  Synthetic: descartes_4976_PRKAR1B
acttttgccgcgccaaaatc

SEQ ID NO: 9064 - DNA, 20 bp, Artificial Sequence
  Synthetic: descartes_4977_PRKAR1B
aggacctgctggatcccgtg

SEQ ID NO: 9065 - DNA, 20 bp, Artificial Sequence
  Synthetic: descartes_4978_PRKAR1B
acggtcgcagccctgggggt

SEQ ID NO: 9066 - DNA, 20 bp, Artificial Sequence
  Synthetic: descartes_4979_PRKCB
acccgccatccaccagtcct

SEQ ID NO: 9067 - DNA, 20 bp, Artificial Sequence
  Synthetic: descartes_4980_PRKCB
agatccacacgtactccagc

SEQ ID NO: 9068 - DNA, 20 bp, Artificial Sequence
  Synthetic: descartes_4981_PRKCB
tcccaatcaatataccggaa

SEQ ID NO: 9069 - DNA, 20 bp, Artificial Sequence
  Synthetic: descartes_4982_PRKCB
gcatgtgtaaggaaaacatc

SEQ ID NO: 9070 - DNA, 20 bp, Artificial Sequence
  Synthetic: descartes_4983_PRKCB
gagacagtgttggtcgtctt

SEQ ID NO: 9071 - DNA, 20 bp, Artificial Sequence
  Synthetic: descartes_4984_PRKCB
cccagcaccattaggaagtt

SEQ ID NO: 9072 - DNA, 20 bp, Artificial Sequence
  Synthetic: descartes_4985_PRKCB
cgtagggatctgacaggcca

SEQ ID NO: 9073 - DNA, 20 bp, Artificial Sequence
  Synthetic: descartes_4986_PRKCB
gtccaagttcatgatgaaga

SEQ ID NO: 9074 - DNA, 20 bp, Artificial Sequence
  Synthetic: descartes_4987_PRKCD
gctgaggccttgaaccaagt

SEQ ID NO: 9075 - DNA, 20 bp, Artificial Sequence
  Synthetic: descartes_4988_PRKCD
tacacagcaagggcatcatt

SEQ ID NO: 9076 - DNA, 20 bp, Artificial Sequence
  Synthetic: descartes_4989_PRKCD
ggatgtgcaaagagaacata

SEQ ID NO: 9077 - DNA, 20 bp, Artificial Sequence
  Synthetic: descartes_4990_PRKCD
gggttcacaaaggagaagcc

SEQ ID NO: 9078 - DNA, 20 bp, Artificial Sequence
  Synthetic: descartes_4991_PRKCD
cccaggaccttgtggaagat

SEQ ID NO: 9079 - DNA, 20 bp, Artificial Sequence
  Synthetic: descartes_4992_PRKCD
gagaagaagaccggagttgc

SEQ ID NO: 9080 - DNA, 20 bp, Artificial Sequence
  Synthetic: descartes_4993_PRKCD
atccctgcttcaccagtccc

SEQ ID NO: 9081 - DNA, 20 bp, Artificial Sequence
  Synthetic: descartes_4994_PRKCD
tcacccacctcatctgcacc

SEQ ID NO: 9082 - DNA, 20 bp, Artificial Sequence
  Synthetic: descartes_4995_PRKCQ
ccgacagagcactgatcaac

SEQ ID NO: 9083 - DNA, 20 bp, Artificial Sequence
  Synthetic: descartes_4996_PRKCQ
gtttaatctgcagagatggt

SEQ ID NO: 9084 - DNA, 20 bp, Artificial Sequence
  Synthetic: descartes_4997_PRKCQ
atggagcatgggagaccaat

SEQ ID NO: 9085 - DNA, 20 bp, Artificial Sequence
  Synthetic: descartes_4998_PRKCQ
gatgtggtacattaagtccc

SEQ ID NO: 9086 - DNA, 20 bp, Artificial Sequence
  Synthetic: descartes_4999_PRKCQ
gcaataaaggccttaaagaa

SEQ ID NO: 9087 - DNA, 20 bp, Artificial Sequence
  Synthetic: descartes_5000_PRKCQ
agagatgaggtccacgtttt

SEQ ID NO: 9088 - DNA, 20 bp, Artificial Sequence
  Synthetic: descartes_5001_PRKCQ
gaatgtgcaaggagaacatg

SEQ ID NO: 9089 - DNA, 20 bp, Artificial Sequence
  Synthetic: descartes_5002_PRKCQ
aaccggaccttctctgaaga

SEQ ID NO: 9090 - DNA, 20 bp, Artificial Sequence
  Synthetic: descartes_5003_PRKCZ
attccatccatcccatcgat

SEQ ID NO: 9091 - DNA, 20 bp, Artificial Sequence
  Synthetic: descartes_5004_PRKCZ
ccgagcacccctgagcagcc

SEQ ID NO: 9092 - DNA, 20 bp, Artificial Sequence
  Synthetic: descartes_5005_PRKCZ
tgcggaaccccgaattacat

SEQ ID NO: 9093 - DNA, 20 bp, Artificial Sequence
  Synthetic: descartes_5006_PRKCZ
cagttgatgcacctgtagcc

SEQ ID NO: 9094 - DNA, 20 bp, Artificial Sequence
  Synthetic: descartes_5007_PRKCZ
cgccatgaaagtggtgaaga

SEQ ID NO: 9095 - DNA, 20 bp, Artificial Sequence
  Synthetic: descartes_5008_PRKCZ
agcaggcatccagcaacccc

SEQ ID NO: 9096 - DNA, 20 bp, Artificial Sequence
  Synthetic: descartes_5009_PRKCZ
ctcatcccggaagcatgaca

SEQ ID NO: 9097 - DNA, 20 bp, Artificial Sequence
  Synthetic: descartes_5010_PRKCZ
agtatatcaacccattattg

SEQ ID NO: 9098 - DNA, 20 bp, Artificial Sequence
  Synthetic: descartes_5011_PRKD2
actgtcacaaacgctgcgcc

SEQ ID NO: 9099 - DNA, 20 bp, Artificial Sequence
  Synthetic: descartes_5012_PRKD2
aagtcacagtggacaatgtt

SEQ ID NO: 9100 - DNA, 20 bp, Artificial Sequence
  Synthetic: descartes_5013_PRKD2
ccaggcttgcaagaaactcc

SEQ ID NO: 9101 - DNA, 20 bp, Artificial Sequence
  Synthetic: descartes_5014_PRKD2
cgggccccactacagttgtt

SEQ ID NO: 9102 - DNA, 20 bp, Artificial Sequence
  Synthetic: descartes_5015_PRKD2
agcgaggctgacaagagcgc

SEQ ID NO: 9103 - DNA, 20 bp, Artificial Sequence
  Synthetic: descartes_5016_PRKD2
agatcgtcactgccaatgcc

SEQ ID NO: 9104 - DNA, 20 bp, Artificial Sequence
  Synthetic: descartes_5017_PRKD2
aacgaggatgaggacatcaa

SEQ ID NO: 9105 - DNA, 20 bp, Artificial Sequence
  Synthetic: descartes_5018_PRKD2
aaacatgaccccacgtcggc

SEQ ID NO: 9106 - DNA, 20 bp, Artificial Sequence
  Synthetic: descartes_5019_PRMT1
atgcaagacatgtcgaagcc

SEQ ID NO: 9107 - DNA, 20 bp, Artificial Sequence
  Synthetic: descartes_5020_PRMT1
gggtccacgacatccactag

SEQ ID NO: 9108 - DNA, 20 bp, Artificial Sequence
  Synthetic: descartes_5021_PRMT1
ataaccggcacctcttcaag

SEQ ID NO: 9109 - DNA, 20 bp, Artificial Sequence
  Synthetic: descartes_5022_PRMT1
actcctacgcacactttggc

SEQ ID NO: 9110 - DNA, 20 bp, Artificial Sequence
  Synthetic: descartes_5023_PRMT1
acgatcttcaccgcataatc

SEQ ID NO: 9111 - DNA, 20 bp, Artificial Sequence
  Synthetic: descartes_5024_PRMT1
tagccaccttggctaatggg

SEQ ID NO: 9112 - DNA, 20 bp, Artificial Sequence
  Synthetic: descartes_5025_PRMT1
gatgtcatgtcctcagcgtt

SEQ ID NO: 9113 - DNA, 20 bp, Artificial Sequence
  Synthetic: descartes_5026_PRMT1
tgaggcaggcgttggtgacc

SEQ ID NO: 9114 - DNA, 20 bp, Artificial Sequence
  Synthetic: descartes_5027_PRMT2
tctgcaacacaactgaaccc

SEQ ID NO: 9115 - DNA, 20 bp, Artificial Sequence
  Synthetic: descartes_5028_PRMT2
aaaccagaagactgtctctc

SEQ ID NO: 9116 - DNA, 20 bp, Artificial Sequence
  Synthetic: descartes_5029_PRMT2
aaagcccaagtataaccaca

SEQ ID NO: 9117 - DNA, 20 bp, Artificial Sequence
  Synthetic: descartes_5030_PRMT2
agaggagaaaaaattcttat

SEQ ID NO: 9118 - DNA, 20 bp, Artificial Sequence
  Synthetic: descartes_5031_PRMT2
caaataaagcatcaactgtc

SEQ ID NO: 9119 - DNA, 20 bp, Artificial Sequence
  Synthetic: descartes_5032_PRMT2
agttcatgatcgagtccatc

SEQ ID NO: 9120 - DNA, 20 bp, Artificial Sequence
  Synthetic: descartes_5033_PRMT2
gcgtccacttccagagcctg

SEQ ID NO: 9121 - DNA, 20 bp, Artificial Sequence
  Synthetic: descartes_5034_PRMT2
ccggaatgtacccacagcag

SEQ ID NO: 9122 - DNA, 20 bp, Artificial Sequence
  Synthetic: descartes_5035_PRMT3
atataccaaaatccacatat

SEQ ID NO: 9123 - DNA, 20 bp, Artificial Sequence
  Synthetic: descartes_5036_PRMT3
ggatgatgtctatggcttca

SEQ ID NO: 9124 - DNA, 20 bp, Artificial Sequence
  Synthetic: descartes_5037_PRMT3
ccctgaaaatcacaaggaca

SEQ ID NO: 9125 - DNA, 20 bp, Artificial Sequence
  Synthetic: descartes_5038_PRMT3
gcagcaaacatagagagaat

SEQ ID NO: 9126 - DNA, 20 bp, Artificial Sequence
  Synthetic: descartes_5039_PRMT3
gtatatgaaatctcggtagc

SEQ ID NO: 9127 - DNA, 20 bp, Artificial Sequence
  Synthetic: descartes_5040_PRMT3
acactgtaagtctgagcatc

SEQ ID NO: 9128 - DNA, 20 bp, Artificial Sequence
  Synthetic: descartes_5041_PRMT3
actgagtccattggggtatg

SEQ ID NO: 9129 - DNA, 20 bp, Artificial Sequence
  Synthetic: descartes_5042_PRMT3
atattgacagcatggttcat

SEQ ID NO: 9130 - DNA, 20 bp, Artificial Sequence
  Synthetic: descartes_5043_PRMT5
tcctccccactgtactcctc

SEQ ID NO: 9131 - DNA, 20 bp, Artificial Sequence
  Synthetic: descartes_5044_PRMT5
tctggagccacccattccct

SEQ ID NO: 9132 - DNA, 20 bp, Artificial Sequence
  Synthetic: descartes_5045_PRMT5
ctgtggaggtgaacacagta

SEQ ID NO: 9133 - DNA, 20 bp, Artificial Sequence
  Synthetic: descartes_5046_PRMT5
ctgaccaataagaagggatt

SEQ ID NO: 9134 - DNA, 20 bp, Artificial Sequence
  Synthetic: descartes_5047_PRMT5
tccacagcatacagctttat

SEQ ID NO: 9135 - DNA, 20 bp, Artificial Sequence
  Synthetic: descartes_5048_PRMT5
agtctggacgaatccatgga

SEQ ID NO: 9136 - DNA, 20 bp, Artificial Sequence
  Synthetic: descartes_5049_PRMT5
ggaagtgctgggctccatcc

SEQ ID NO: 9137 - DNA, 20 bp, Artificial Sequence
  Synthetic: descartes_5050_PRMT5
aagagggagttcattcagga

SEQ ID NO: 9138 - DNA, 20 bp, Artificial Sequence
  Synthetic: descartes_5051_PRMT6
acccggccactcactggaaa

SEQ ID NO: 9139 - DNA, 20 bp, Artificial Sequence
  Synthetic: descartes_5052_PRMT6
aggagagatcacgctgctgc

SEQ ID NO: 9140 - DNA, 20 bp, Artificial Sequence
  Synthetic: descartes_5053_PRMT6
ggtccacgaggagatgatcg

SEQ ID NO: 9141 - DNA, 20 bp, Artificial Sequence
  Synthetic: descartes_5054_PRMT6
tccgactcccctccagggaa

SEQ ID NO: 9142 - DNA, 20 bp, Artificial Sequence
  Synthetic: descartes_5055_PRMT6
cagtgagtggccgggtgaaa

SEQ ID NO: 9143 - DNA, 20 bp, Artificial Sequence
  Synthetic: descartes_5056_PRMT6
ccatctggttccaggtgacc

SEQ ID NO: 9144 - DNA, 20 bp, Artificial Sequence
  Synthetic: descartes_5057_PRMT6
gtcttctcctcctggtctcc

SEQ ID NO: 9145 - DNA, 20 bp, Artificial Sequence
  Synthetic: descartes_5058_PRMT6
ctcagctagagctctcccgc

SEQ ID NO: 9146 - DNA, 20 bp, Artificial Sequence
  Synthetic: descartes_5059_PRMT7
gagagatcaatgaccaggac

SEQ ID NO: 9147 - DNA, 20 bp, Artificial Sequence
  Synthetic: descartes_5060_PRMT7
gtgataagattaaggttatc

SEQ ID NO: 9148 - DNA, 20 bp, Artificial Sequence
  Synthetic: descartes_5061_PRMT7
tgagaagctgctgaactctc

SEQ ID NO: 9149 - DNA, 20 bp, Artificial Sequence
  Synthetic: descartes_5062_PRMT7
accccgacacaggcgacatc

SEQ ID NO: 9150 - DNA, 20 bp, Artificial Sequence
  Synthetic: descartes_5063_PRMT7
aatgtcccaccacgagagaa

SEQ ID NO: 9151 - DNA, 20 bp, Artificial Sequence
  Synthetic: descartes_5064_PRMT7
tccacaatcttcacagcagc

SEQ ID NO: 9152 - DNA, 20 bp, Artificial Sequence
  Synthetic: descartes_5065_PRMT7
ccatccacgtgcagaccagc

SEQ ID NO: 9153 - DNA, 20 bp, Artificial Sequence
  Synthetic: descartes_5066_PRMT7
cagtcgagagttcagcagct

SEQ ID NO: 9154 - DNA, 20 bp, Artificial Sequence
  Synthetic: descartes_5067_PRMT8
agggacagctgtgtgaaaca

SEQ ID NO: 9155 - DNA, 20 bp, Artificial Sequence
  Synthetic: descartes_5068_PRMT8
tgactactcagagaagatca

SEQ ID NO: 9156 - DNA, 20 bp, Artificial Sequence
  Synthetic: descartes_5069_PRMT8
ctcccccctccggacagtga

SEQ ID NO: 9157 - DNA, 20 bp, Artificial Sequence
  Synthetic: descartes_5070_PRMT8
gatccacgatgtccactaga

SEQ ID NO: 9158 - DNA, 20 bp, Artificial Sequence
  Synthetic: descartes_5071_PRMT8
ccaagtgccacaagaaaatg

SEQ ID NO: 9159 - DNA, 20 bp, Artificial Sequence
  Synthetic: descartes_5072_PRMT8
acacagctgtcccttaaaat

SEQ ID NO: 9160 - DNA, 20 bp, Artificial Sequence
  Synthetic: descartes_5073_PRMT8
ttgtggcacttggtaaattc

SEQ ID NO: 9161 - DNA, 20 bp, Artificial Sequence
  Synthetic: descartes_5074_PRMT8
aagtccttgtactgtctgtc

SEQ ID NO: 9162 - DNA, 20 bp, Artificial Sequence
  Synthetic: descartes_5075_PRNP
acgatagtaacggtcctcat

SEQ ID NO: 9163 - DNA, 20 bp, Artificial Sequence
  Synthetic: descartes_5076_PRNP
gcttactcggcttgttccac

SEQ ID NO: 9164 - DNA, 20 bp, Artificial Sequence
  Synthetic: descartes_5077_PRNP
ggcagtgactatgaggaccg

SEQ ID NO: 9165 - DNA, 20 bp, Artificial Sequence
  Synthetic: descartes_5078_PRNP
tgcacgactgcgtcaatatc

SEQ ID NO: 9166 - DNA, 20 bp, Artificial Sequence
  Synthetic: descartes_5079_PRNP
ctcatcttcctgatagtggg

SEQ ID NO: 9167 - DNA, 20 bp, Artificial Sequence
  Synthetic: descartes_5080_PRNP
tggccacatggagtgacctg

SEQ ID NO: 9168 - DNA, 20 bp, Artificial Sequence
  Synthetic: descartes_5081_PRR36
cctaggggacattgtcagga

SEQ ID NO: 9169 - DNA, 20 bp, Artificial Sequence
  Synthetic: descartes_5082_PRR36
atcccctctgcagagtatgc

SEQ ID NO: 9170 - DNA, 20 bp, Artificial Sequence
  Synthetic: descartes_5083_PRR36
ccttcctgcctcaccccctc

SEQ ID NO: 9171 - DNA, 20 bp, Artificial Sequence
  Synthetic: descartes_5084_PRR36
gcctcaccgcctctgcaggc

SEQ ID NO: 9172 - DNA, 20 bp, Artificial Sequence
  Synthetic: descartes_5085_PRR36
gctaagccccctccacaggc

SEQ ID NO: 9173 - DNA, 20 bp, Artificial Sequence
  Synthetic: descartes_5086_PRR36
ggctcacccactctgcaggc

SEQ ID NO: 9174 - DNA, 20 bp, Artificial Sequence
  Synthetic: descartes_5087_PRR36
tctccccctccctcaccccc

SEQ ID NO: 9175 - DNA, 20 bp, Artificial Sequence
  Synthetic: descartes_5088_PRR36
gccacaccctctccatcggg

SEQ ID NO: 9176 - DNA, 20 bp, Artificial Sequence
  Synthetic: descartes_5089_PSEN1
ccaaccagaacactgtagaa

SEQ ID NO: 9177 - DNA, 20 bp, Artificial Sequence
  Synthetic: descartes_5090_PSEN1
aagaaagcattgccagctct

SEQ ID NO: 9178 - DNA, 20 bp, Artificial Sequence
  Synthetic: descartes_5091_PSEN1
gtgtggtgggaatgatttcc

SEQ ID NO: 9179 - DNA, 20 bp, Artificial Sequence
  Synthetic: descartes_5092_PSEN1
aatgtcagctcctcatcttc

SEQ ID NO: 9180 - DNA, 20 bp, Artificial Sequence
  Synthetic: descartes_5093_PSEN1
cattcactggaaaggtccac

SEQ ID NO: 9181 - DNA, 20 bp, Artificial Sequence
  Synthetic: descartes_5094_PSEN1
tacagaaccaccaggaggat

SEQ ID NO: 9182 - DNA, 20 bp, Artificial Sequence
  Synthetic: descartes_5095_PSEN1
gatactctcctttgagcttc

SEQ ID NO: 9183 - DNA, 20 bp, Artificial Sequence
  Synthetic: descartes_5096_PSEN1
tgtccgaaaggtccacttcg

SEQ ID NO: 9184 - DNA, 20 bp, Artificial Sequence
  Synthetic: descartes_5097_PSIP1
gctaaaacaggggttacttc

SEQ ID NO: 9185 - DNA, 20 bp, Artificial Sequence
  Synthetic: descartes_5098_PSIP1
agtgtagtaatcatctctgt

SEQ ID NO: 9186 - DNA, 20 bp, Artificial Sequence
  Synthetic: descartes_5099_PSIP1
ggaccaaaggatatatttcc

SEQ ID NO: 9187 - DNA, 20 bp, Artificial Sequence
  Synthetic: descartes_5100_PSIP1
tgggagatagataacaatcc

SEQ ID NO: 9188 - DNA, 20 bp, Artificial Sequence
  Synthetic: descartes_5101_PSIP1
gattaacagatgctgttgct

SEQ ID NO: 9189 - DNA, 20 bp, Artificial Sequence
  Synthetic: descartes_5102_PSIP1
aaaggaagataccgaccatg

SEQ ID NO: 9190 - DNA, 20 bp, Artificial Sequence
  Synthetic: descartes_5103_PSIP1
tgagtaaggaaatatatcct

SEQ ID NO: 9191 - DNA, 20 bp, Artificial Sequence
  Synthetic: descartes_5104_PSIP1
atctcagcatgtatcctttg

SEQ ID NO: 9192 - DNA, 20 bp, Artificial Sequence
  Synthetic: descartes_5105_PTGER2
ctggcatctgactgtgtaga

SEQ ID NO: 9193 - DNA, 20 bp, Artificial Sequence
  Synthetic: descartes_5106_PTGER2
attaagaacacaagatgcaa

SEQ ID NO: 9194 - DNA, 20 bp, Artificial Sequence
  Synthetic: descartes_5107_PTGER2
catatatgaatgaaacctct

SEQ ID NO: 9195 - DNA, 20 bp, Artificial Sequence
  Synthetic: descartes_5108_PTGER2
gggaagaggtttcattcata

SEQ ID NO: 9196 - DNA, 20 bp, Artificial Sequence
  Synthetic: descartes_5109_PTGER2
ctttcgggaagaggtttcat

SEQ ID NO: 9197 - DNA, 20 bp, Artificial Sequence
  Synthetic: descartes_5110_PTGER2
gcctgggggaagccactgtc

SEQ ID NO: 9198 - DNA, 20 bp, Artificial Sequence
  Synthetic: descartes_5111_PTGER2
gccatgaccttcttcagcct

SEQ ID NO: 9199 - DNA, 20 bp, Artificial Sequence
  Synthetic: descartes_5112_PTGER2
tgttgcatcttgtgttctta

SEQ ID NO: 9200 - DNA, 20 bp, Artificial Sequence
  Synthetic: descartes_5113_PTGER4
gagcgagaagtcagtaaaaa

SEQ ID NO: 9201 - DNA, 20 bp, Artificial Sequence
  Synthetic: descartes_5114_PTGER4
actgaggtctggcagtgaga

SEQ ID NO: 9202 - DNA, 20 bp, Artificial Sequence
  Synthetic: descartes_5115_PTGER4
actgggaaatgtgacttgca

SEQ ID NO: 9203 - DNA, 20 bp, Artificial Sequence
  Synthetic: descartes_5116_PTGER4
ccagtgaaacactgaactta

SEQ ID NO: 9204 - DNA, 20 bp, Artificial Sequence
  Synthetic: descartes_5117_PTGER4
tgataagttcagtgtttcac

SEQ ID NO: 9205 - DNA, 20 bp, Artificial Sequence
  Synthetic: descartes_5118_PTGER4
ctgacttctcgctccaaact

SEQ ID NO: 9206 - DNA, 20 bp, Artificial Sequence
  Synthetic: descartes_5119_PTGER4
tcaggaggatatatatccag

SEQ ID NO: 9207 - DNA, 20 bp, Artificial Sequence
  Synthetic: descartes_5120_PTGER4
actgtctgagcagtgctgtc

SEQ ID NO: 9208 - DNA, 20 bp, Artificial Sequence
  Synthetic: descartes_5121_PTK2B
ccaggattgaagctgttgct

SEQ ID NO: 9209 - DNA, 20 bp, Artificial Sequence
  Synthetic: descartes_5122_PTK2B
gggaggtctatgaaggtgtc

SEQ ID NO: 9210 - DNA, 20 bp, Artificial Sequence
  Synthetic: descartes_5123_PTK2B
tgtagacaccttcatagacc

SEQ ID NO: 9211 - DNA, 20 bp, Artificial Sequence
  Synthetic: descartes_5124_PTK2B
gtcgggaatctctgcgtaga

SEQ ID NO: 9212 - DNA, 20 bp, Artificial Sequence
  Synthetic: descartes_5125_PTK2B
ccaaagcagatgcaggagaa

SEQ ID NO: 9213 - DNA, 20 bp, Artificial Sequence
  Synthetic: descartes_5126_PTK2B
gggccaatgaccaggtccac

SEQ ID NO: 9214 - DNA, 20 bp, Artificial Sequence
  Synthetic: descartes_5127_PTK2B
ggaaaaacaagtccagcccc

SEQ ID NO: 9215 - DNA, 20 bp, Artificial Sequence
  Synthetic: descartes_5128_PTK2B
ggggttcggtagcgagcatt

SEQ ID NO: 9216 - DNA, 20 bp, Artificial Sequence
  Synthetic: descartes_5129_PTPN11
atagactctagcactgtctt

SEQ ID NO: 9217 - DNA, 20 bp, Artificial Sequence
  Synthetic: descartes_5130_PTPN11
ggaacgtcaatatcgcagtc

SEQ ID NO: 9218 - DNA, 20 bp, Artificial Sequence
  Synthetic: descartes_5131_PTPN11
agattacatcaatgcaaata

SEQ ID NO: 9219 - DNA, 20 bp, Artificial Sequence
  Synthetic: descartes_5132_PTPN11
tcccctccatacaggtcata

SEQ ID NO: 9220 - DNA, 20 bp, Artificial Sequence
  Synthetic: descartes_5133_PTPN11
ttggaacaccatccgccaaa

SEQ ID NO: 9221 - DNA, 20 bp, Artificial Sequence
  Synthetic: descartes_5134_PTPN11
gctgagttggtccagtatta

SEQ ID NO: 9222 - DNA, 20 bp, Artificial Sequence
  Synthetic: descartes_5135_PTPN11
agttctcttagcgtatagtc

SEQ ID NO: 9223 - DNA, 20 bp, Artificial Sequence
  Synthetic: descartes_5136_PTPN11
tctatatggcggtccagcat

SEQ ID NO: 9224 - DNA, 20 bp, Artificial Sequence
  Synthetic: descartes_5137_PTPN13
gctggatcctgtatgacatc

SEQ ID NO: 9225 - DNA, 20 bp, Artificial Sequence
  Synthetic: descartes_5138_PTPN13
gcatgatctcttgattaatt

SEQ ID NO: 9226 - DNA, 20 bp, Artificial Sequence
  Synthetic: descartes_5139_PTPN13
gctgagagataacaagtgtc

SEQ ID NO: 9227 - DNA, 20 bp, Artificial Sequence
  Synthetic: descartes_5140_PTPN13
gatgcagcccggagcagatt

SEQ ID NO: 9228 - DNA, 20 bp, Artificial Sequence
  Synthetic: descartes_5141_PTPN13
cagtaaccaaaggcaatcag

SEQ ID NO: 9229 - DNA, 20 bp, Artificial Sequence
  Synthetic: descartes_5142_PTPN13
actggaggtactaaagacat

SEQ ID NO: 9230 - DNA, 20 bp, Artificial Sequence
  Synthetic: descartes_5143_PTPN13
ggtgaccaaacctggcagga

SEQ ID NO: 9231 - DNA, 20 bp, Artificial Sequence
  Synthetic: descartes_5144_PTPN13
ccaccaactctgcaacggtt

SEQ ID NO: 9232 - DNA, 20 bp, Artificial Sequence
  Synthetic: descartes_5145_PTPN2
gttgacatagaagaggcaca

SEQ ID NO: 9233 - DNA, 20 bp, Artificial Sequence
  Synthetic: descartes_5146_PTPN2
gaggaaagtcctgtacatcg

SEQ ID NO: 9234 - DNA, 20 bp, Artificial Sequence
  Synthetic: descartes_5147_PTPN2
gagtccctgaatcaccagct

SEQ ID NO: 9235 - DNA, 20 bp, Artificial Sequence
  Synthetic: descartes_5148_PTPN2
gcagcagaagaccaaagcag

SEQ ID NO: 9236 - DNA, 20 bp, Artificial Sequence
  Synthetic: descartes_5149_PTPN2
cagaaaacagaaatcgaaac

SEQ ID NO: 9237 - DNA, 20 bp, Artificial Sequence
  Synthetic: descartes_5150_PTPN2
aagtgagagaatctggctcc

SEQ ID NO: 9238 - DNA, 20 bp, Artificial Sequence
  Synthetic: descartes_5151_PTPN2
attatactacctggccagat

SEQ ID NO: 9239 - DNA, 20 bp, Artificial Sequence
  Synthetic: descartes_5152_PTPN2
aaatacagtgtgatccacaa

SEQ ID NO: 9240 - DNA, 20 bp, Artificial Sequence
  Synthetic: descartes_5153_PTPN22
ccttcacagctgaggataag

SEQ ID NO: 9241 - DNA, 20 bp, Artificial Sequence
  Synthetic: descartes_5154_PTPN22
cctgagaagcaagatggaac

SEQ ID NO: 9242 - DNA, 20 bp, Artificial Sequence
  Synthetic: descartes_5155_PTPN22
gctccagaaagtcaaaagaa

SEQ ID NO: 9243 - DNA, 20 bp, Artificial Sequence
  Synthetic: descartes_5156_PTPN22
gaattagaacatccctcaaa

SEQ ID NO: 9244 - DNA, 20 bp, Artificial Sequence
  Synthetic: descartes_5157_PTPN22
gcagggtgcaaaactagctc

SEQ ID NO: 9245 - DNA, 20 bp, Artificial Sequence
  Synthetic: descartes_5158_PTPN22
gcaacatccatgtataatca

SEQ ID NO: 9246 - DNA, 20 bp, Artificial Sequence
  Synthetic: descartes_5159_PTPN22
gagtcatatggcagtgaata

SEQ ID NO: 9247 - DNA, 20 bp, Artificial Sequence
  Synthetic: descartes_5160_PTPN22
attacaagaattggccagac

SEQ ID NO: 9248 - DNA, 20 bp, Artificial Sequence
  Synthetic: descartes_5161_PTPN6
gagaccttcgacagcctcac

SEQ ID NO: 9249 - DNA, 20 bp, Artificial Sequence
  Synthetic: descartes_5162_PTPN6
accgagacctcagtgggctg

SEQ ID NO: 9250 - DNA, 20 bp, Artificial Sequence
  Synthetic: descartes_5163_PTPN6
cagaagcaggaggtgaagaa

SEQ ID NO: 9251 - DNA, 20 bp, Artificial Sequence
  Synthetic: descartes_5164_PTPN6
tgtgctcagtgaccagccca

SEQ ID NO: 9252 - DNA, 20 bp, Artificial Sequence
  Synthetic: descartes_5165_PTPN6
tatgacctgtatggagggga

SEQ ID NO: 9253 - DNA, 20 bp, Artificial Sequence
  Synthetic: descartes_5166_PTPN6
aatgaactgggcgatggcca

SEQ ID NO: 9254 - DNA, 20 bp, Artificial Sequence
  Synthetic: descartes_5167_PTPN6
cgactctgacagagctggtg

SEQ ID NO: 9255 - DNA, 20 bp, Artificial Sequence
  Synthetic: descartes_5168_PTPN6
ttgtgcgtgagagcctcagc

SEQ ID NO: 9256 - DNA, 20 bp, Artificial Sequence
  Synthetic: descartes_5169_PTPRC
gatgaacagcaggagcttgt

SEQ ID NO: 9257 - DNA, 20 bp, Artificial Sequence
  Synthetic: descartes_5170_PTPRC
aaagaacccaggaaatacat

SEQ ID NO: 9258 - DNA, 20 bp, Artificial Sequence
  Synthetic: descartes_5171_PTPRC
gcagatgatcttccaaagaa

SEQ ID NO: 9259 - DNA, 20 bp, Artificial Sequence
  Synthetic: descartes_5172_PTPRC
ggaacagaaagccacagtta

SEQ ID NO: 9260 - DNA, 20 bp, Artificial Sequence
  Synthetic: descartes_5173_PTPRC
cttctccccagtactgagca

SEQ ID NO: 9261 - DNA, 20 bp, Artificial Sequence
  Synthetic: descartes_5174_PTPRC
agttctgtcagcataacaat

SEQ ID NO: 9262 - DNA, 20 bp, Artificial Sequence
  Synthetic: descartes_5175_PTPRC
aagtggtaaaagctctacgc

SEQ ID NO: 9263 - DNA, 20 bp, Artificial Sequence
  Synthetic: descartes_5176_PTPRC
gtggaatacaatcagtttgg

SEQ ID NO: 9264 - DNA, 20 bp, Artificial Sequence
  Synthetic: descartes_5177_PTPRJ
tcccaaaccatacgccaaaa

SEQ ID NO: 9265 - DNA, 20 bp, Artificial Sequence
  Synthetic: descartes_5178_PTPRJ
agaacacctgaacaaggatc

SEQ ID NO: 9266 - DNA, 20 bp, Artificial Sequence
  Synthetic: descartes_5179_PTPRJ
ccctgtggcaacagttgcta

SEQ ID NO: 9267 - DNA, 20 bp, Artificial Sequence
  Synthetic: descartes_5180_PTPRJ
agatgccccatcagtcccat

SEQ ID NO: 9268 - DNA, 20 bp, Artificial Sequence
  Synthetic: descartes_5181_PTPRJ
ggttgactaattccaacaag

SEQ ID NO: 9269 - DNA, 20 bp, Artificial Sequence
  Synthetic: descartes_5182_PTPRJ
ggagaaaaatgtatatgcca

SEQ ID NO: 9270 - DNA, 20 bp, Artificial Sequence
  Synthetic: descartes_5183_PTPRJ
actgtgaaatctctgatggt

SEQ ID NO: 9271 - DNA, 20 bp, Artificial Sequence
  Synthetic: descartes_5184_PTPRJ
acgtcaccgctgtgaacatc

SEQ ID NO: 9272 - DNA, 20 bp, Artificial Sequence
  Synthetic: descartes_5185_PVR
gtggaagacggccatgctgc

SEQ ID NO: 9273 - DNA, 20 bp, Artificial Sequence
  Synthetic: descartes_5186_PVR
gaccaatagaaataaatccc

SEQ ID NO: 9274 - DNA, 20 bp, Artificial Sequence
  Synthetic: descartes_5187_PVR
atctgcaacgtcaccaatgc

SEQ ID NO: 9275 - DNA, 20 bp, Artificial Sequence
  Synthetic: descartes_5188_PVR
tgatcctgctggggatcggg

SEQ ID NO: 9276 - DNA, 20 bp, Artificial Sequence
  Synthetic: descartes_5189_PVR
tccacaggacggatcaggag

SEQ ID NO: 9277 - DNA, 20 bp, Artificial Sequence
  Synthetic: descartes_5190_PVR
gcactgtcatctgtgtccct

SEQ ID NO: 9278 - DNA, 20 bp, Artificial Sequence
  Synthetic: descartes_5191_PVR
gactccgaatagctggggcc

SEQ ID NO: 9279 - DNA, 20 bp, Artificial Sequence
  Synthetic: descartes_5192_PVR
agaagcctcagctgctgact

SEQ ID NO: 9280 - DNA, 20 bp, Artificial Sequence
  Synthetic: descartes_5193_PVRIG
gctgtgtctacctccttcat

SEQ ID NO: 9281 - DNA, 20 bp, Artificial Sequence
  Synthetic: descartes_5194_PVRIG
cctgaccctcgggggcccag

SEQ ID NO: 9282 - DNA, 20 bp, Artificial Sequence
  Synthetic: descartes_5195_PVRIG
ccagcgggcctggcgagcag

SEQ ID NO: 9283 - DNA, 20 bp, Artificial Sequence
  Synthetic: descartes_5196_PVRIG
gacacagctcacccccatgg

SEQ ID NO: 9284 - DNA, 20 bp, Artificial Sequence
  Synthetic: descartes_5197_PVRIG
cgtccttccctgagggctcc

SEQ ID NO: 9285 - DNA, 20 bp, Artificial Sequence
  Synthetic: descartes_5198_PVRIG
tctctgttgagaatggactc

SEQ ID NO: 9286 - DNA, 20 bp, Artificial Sequence
  Synthetic: descartes_5199_PWWP2B
gtgcagtccagcaggatccc

SEQ ID NO: 9287 - DNA, 20 bp, Artificial Sequence
  Synthetic: descartes_5200_PWWP2B
gttctccgactacgtcgttc

SEQ ID NO: 9288 - DNA, 20 bp, Artificial Sequence
  Synthetic: descartes_5201_PWWP2B
atcgtaagaagaaggggatg

SEQ ID NO: 9289 - DNA, 20 bp, Artificial Sequence
  Synthetic: descartes_5202_PWWP2B
gcgagcctctctggacaccg

SEQ ID NO: 9290 - DNA, 20 bp, Artificial Sequence
  Synthetic: descartes_5203_PWWP2B
cgatacatccccttcttctt

SEQ ID NO: 9291 - DNA, 20 bp, Artificial Sequence
  Synthetic: descartes_5204_PWWP2B
aaactgggttaagagctccc

SEQ ID NO: 9292 - DNA, 20 bp, Artificial Sequence
  Synthetic: descartes_5205_PWWP2B
aaatagacaagaacgacgta

SEQ ID NO: 9293 - DNA, 20 bp, Artificial Sequence
  Synthetic: descartes_5206_PWWP2B
gcctacccccgttggctccg

SEQ ID NO: 9294 - DNA, 20 bp, Artificial Sequence
  Synthetic: descartes_5207_PXDN
acatcagccctgaaggattc

SEQ ID NO: 9295 - DNA, 20 bp, Artificial Sequence
  Synthetic: descartes_5208_PXDN
ggcgggaatctgtcttcatg

SEQ ID NO: 9296 - DNA, 20 bp, Artificial Sequence
  Synthetic: descartes_5209_PXDN
gccacacgcttgtcaaccca

SEQ ID NO: 9297 - DNA, 20 bp, Artificial Sequence
  Synthetic: descartes_5210_PXDN
cccgccaccccgaacagccc

SEQ ID NO: 9298 - DNA, 20 bp, Artificial Sequence
  Synthetic: descartes_5211_PXDN
ctccgccctcttctgtaagc

SEQ ID NO: 9299 - DNA, 20 bp, Artificial Sequence
  Synthetic: descartes_5212_PXDN
acagaatcagagagatccaa

SEQ ID NO: 9300 - DNA, 20 bp, Artificial Sequence
  Synthetic: descartes_5213_PXDN
acagtcgcagtgaagtgtgt

SEQ ID NO: 9301 - DNA, 20 bp, Artificial Sequence
  Synthetic: descartes_5214_PXDN
ccagcattcccagcgacaca

SEQ ID NO: 9302 - DNA, 20 bp, Artificial Sequence
  Synthetic: descartes_5215_PYGO1
ctataaaccactaccttcgt

SEQ ID NO: 9303 - DNA, 20 bp, Artificial Sequence
  Synthetic: descartes_5216_PYGO1
gttgctccttgagtaaagtc

SEQ ID NO: 9304 - DNA, 20 bp, Artificial Sequence
  Synthetic: descartes_5217_PYGO1
ggtaatccatcttataataa

SEQ ID NO: 9305 - DNA, 20 bp, Artificial Sequence
  Synthetic: descartes_5218_PYGO1
gaggctatagtacattcaga

SEQ ID NO: 9306 - DNA, 20 bp, Artificial Sequence
  Synthetic: descartes_5219_PYGO1
agtcaaattcctccacagaa

SEQ ID NO: 9307 - DNA, 20 bp, Artificial Sequence
  Synthetic: descartes_5220_PYGO1
gacaaaatcctgctgaaaat

SEQ ID NO: 9308 - DNA, 20 bp, Artificial Sequence
  Synthetic: descartes_5221_PYGO1
ggggaggaataaaagaatga

SEQ ID NO: 9309 - DNA, 20 bp, Artificial Sequence
  Synthetic: descartes_5222_PYGO1
tctagtacgcattaactgga

SEQ ID NO: 9310 - DNA, 20 bp, Artificial Sequence
  Synthetic: descartes_5223_PYGO2
gtcccatgatctcacccacc

SEQ ID NO: 9311 - DNA, 20 bp, Artificial Sequence
  Synthetic: descartes_5224_PYGO2
cccaggagccccactcaggc

SEQ ID NO: 9312 - DNA, 20 bp, Artificial Sequence
  Synthetic: descartes_5225_PYGO2
ggggctccgaagtcatcttc

SEQ ID NO: 9313 - DNA, 20 bp, Artificial Sequence
  Synthetic: descartes_5226_PYGO2
ccagccaacccttcaaccag

SEQ ID NO: 9314 - DNA, 20 bp, Artificial Sequence
  Synthetic: descartes_5227_PYGO2
gtcctcccagtgggcagatg

SEQ ID NO: 9315 - DNA, 20 bp, Artificial Sequence
  Synthetic: descartes_5228_PYGO2
aagatgacttcggagccccc

SEQ ID NO: 9316 - DNA, 20 bp, Artificial Sequence
  Synthetic: descartes_5229_PYGO2
gcccttctcctctccagaga

SEQ ID NO: 9317 - DNA, 20 bp, Artificial Sequence
  Synthetic: descartes_5230_PYGO2
tggcaggaggcctcacacag

SEQ ID NO: 9318 - DNA, 20 bp, Artificial Sequence
  Synthetic: descartes_5231_RAB27A
cctgaaatcaatgcccactg

SEQ ID NO: 9319 - DNA, 20 bp, Artificial Sequence
  Synthetic: descartes_5232_RAB27A
gtagcttaacgacagcgttc

SEQ ID NO: 9320 - DNA, 20 bp, Artificial Sequence
  Synthetic: descartes_5233_RAB27A
atctgacaaatgagcaaagt

SEQ ID NO: 9321 - DNA, 20 bp, Artificial Sequence
  Synthetic: descartes_5234_RAB27A
ccatctgtatattggtaaag

SEQ ID NO: 9322 - DNA, 20 bp, Artificial Sequence
  Synthetic: descartes_5235_RAB27A
ccaatatacagatggtaaat

SEQ ID NO: 9323 - DNA, 20 bp, Artificial Sequence
  Synthetic: descartes_5236_RAB27A
atcgcaccactccttcagga

SEQ ID NO: 9324 - DNA, 20 bp, Artificial Sequence
  Synthetic: descartes_5237_RAB27A
gctttgggagactctggtgt

SEQ ID NO: 9325 - DNA, 20 bp, Artificial Sequence
  Synthetic: descartes_5238_RAB27A
acaatatgcatgcatctgta

SEQ ID NO: 9326 - DNA, 20 bp, Artificial Sequence
  Synthetic: descartes_5239_RAB29
acgttaccaatgccactacc

SEQ ID NO: 9327 - DNA, 20 bp, Artificial Sequence
  Synthetic: descartes_5240_RAB29
tgtccaacctgtgaaaccgt

SEQ ID NO: 9328 - DNA, 20 bp, Artificial Sequence
  Synthetic: descartes_5241_RAB29
acaggttggacagaaacatc

SEQ ID NO: 9329 - DNA, 20 bp, Artificial Sequence
  Synthetic: descartes_5242_RAB29
ctgaagctgtcctgggaata

SEQ ID NO: 9330 - DNA, 20 bp, Artificial Sequence
  Synthetic: descartes_5243_RAB29
cacctctggctgttgctgaa

SEQ ID NO: 9331 - DNA, 20 bp, Artificial Sequence
  Synthetic: descartes_5244_RAB29
ctctgaaggttctccagtgg

SEQ ID NO: 9332 - DNA, 20 bp, Artificial Sequence
  Synthetic: descartes_5245_RAB29
tccacccaaggggactacat

SEQ ID NO: 9333 - DNA, 20 bp, Artificial Sequence
  Synthetic: descartes_5246_RAB29
ttctccttgactgatgtttc

SEQ ID NO: 9334 - DNA, 20 bp, Artificial Sequence
  Synthetic: descartes_5247_RAC1
ccttgtgagtcctgcatcat

SEQ ID NO: 9335 - DNA, 20 bp, Artificial Sequence
  Synthetic: descartes_5248_RAC1
catctaccataacattggca

SEQ ID NO: 9336 - DNA, 20 bp, Artificial Sequence
  Synthetic: descartes_5249_RAC1
aaatgatgcaggactcacaa

SEQ ID NO: 9337 - DNA, 20 bp, Artificial Sequence
  Synthetic: descartes_5250_RAC1
gttcccactaggatgatggg

SEQ ID NO: 9338 - DNA, 20 bp, Artificial Sequence
  Synthetic: descartes_5251_RAC1
ccccgggaggttatatcctt

SEQ ID NO: 9339 - DNA, 20 bp, Artificial Sequence
  Synthetic: descartes_5252_RAC1
acgaagcgatccgagcagtc

SEQ ID NO: 9340 - DNA, 20 bp, Artificial Sequence
  Synthetic: descartes_5253_RAC1
cggataggatagggggcgta

SEQ ID NO: 9341 - DNA, 20 bp, Artificial Sequence
  Synthetic: descartes_5254_RAC1
tcatccctaagatcaagttt

SEQ ID NO: 9342 - DNA, 20 bp, Artificial Sequence
  Synthetic: descartes_5255_RAET1E
ccaccagacacagatgagaa

SEQ ID NO: 9343 - DNA, 20 bp, Artificial Sequence
  Synthetic: descartes_5256_RAET1E
atgtcacaaaggagcatcct

SEQ ID NO: 9344 - DNA, 20 bp, Artificial Sequence
  Synthetic: descartes_5257_RAET1E
atgggaattgttctcatctg

SEQ ID NO: 9345 - DNA, 20 bp, Artificial Sequence
  Synthetic: descartes_5258_RAET1E
tagtgaagttgaagcaaaga

SEQ ID NO: 9346 - DNA, 20 bp, Artificial Sequence
  Synthetic: descartes_5259_RAET1E
cttcagtacaacagtgacaa

SEQ ID NO: 9347 - DNA, 20 bp, Artificial Sequence
  Synthetic: descartes_5260_RAET1E
tgctgttgctactaatagcc

SEQ ID NO: 9348 - DNA, 20 bp, Artificial Sequence
  Synthetic: descartes_5261_RAET1E
accatgttgttgtcactgtt

SEQ ID NO: 9349 - DNA, 20 bp, Artificial Sequence
  Synthetic: descartes_5262_RAET1E
ggtcaattctccccaagtgc

SEQ ID NO: 9350 - DNA, 20 bp, Artificial Sequence
  Synthetic: descartes_5263_RAET1G
gatggacagatcttcctcct

SEQ ID NO: 9351 - DNA, 20 bp, Artificial Sequence
  Synthetic: descartes_5264_RAET1G
cctatcattggagacgactc

SEQ ID NO: 9352 - DNA, 20 bp, Artificial Sequence
  Synthetic: descartes_5265_RAET1G
ctatgacatcaccgtcatcc

SEQ ID NO: 9353 - DNA, 20 bp, Artificial Sequence
  Synthetic: descartes_5266_RAET1G
tgagtcaaagaggaggaaga

SEQ ID NO: 9354 - DNA, 20 bp, Artificial Sequence
  Synthetic: descartes_5267_RAET1G
ggtcagactgtgcctggagc

SEQ ID NO: 9355 - DNA, 20 bp, Artificial Sequence
  Synthetic: descartes_5268_RAET1G
tgctcacaagacatcctggc

SEQ ID NO: 9356 - DNA, 20 bp, Artificial Sequence
  Synthetic: descartes_5269_RAET1G
atccacctggccttgaaccg

SEQ ID NO: 9357 - DNA, 20 bp, Artificial Sequence
  Synthetic: descartes_5270_RAET1G
actcagaaaacagaatgtgg

SEQ ID NO: 9358 - DNA, 20 bp, Artificial Sequence
  Synthetic: descartes_5271_RAET1L
ctatgacatcaccgtcatcc

SEQ ID NO: 9359 - DNA, 20 bp, Artificial Sequence
  Synthetic: descartes_5272_RAET1L
tgctcacaagacatccttgc

SEQ ID NO: 9360 - DNA, 20 bp, Artificial Sequence
  Synthetic: descartes_5273_RAET1L
atccacctggccttgaaccg

SEQ ID NO: 9361 - DNA, 20 bp, Artificial Sequence
  Synthetic: descartes_5274_RAET1L
actcagagaagagaatgtgg

SEQ ID NO: 9362 - DNA, 20 bp, Artificial Sequence
  Synthetic: descartes_5275_RAET1L
ctgcctcctcatcatcctcc

SEQ ID NO: 9363 - DNA, 20 bp, Artificial Sequence
  Synthetic: descartes_5276_RAET1L
cttctgtgcctcccgcttct

SEQ ID NO: 9364 - DNA, 20 bp, Artificial Sequence
  Synthetic: descartes_5277_RAET1L
ttcactatgactgtggcaac

SEQ ID NO: 9365 - DNA, 20 bp, Artificial Sequence
  Synthetic: descartes_5278_RAET1L
tggctccaggatgaaccgtt

SEQ ID NO: 9366 - DNA, 20 bp, Artificial Sequence
  Synthetic: descartes_5279_RAG1
cctcatacctatacttgaac

SEQ ID NO: 9367 - DNA, 20 bp, Artificial Sequence
  Synthetic: descartes_5280_RAG1
ccatgaaccctcaggcaagc

SEQ ID NO: 9368 - DNA, 20 bp, Artificial Sequence
  Synthetic: descartes_5281_RAG1
gctgagacccctttcacccg

SEQ ID NO: 9369 - DNA, 20 bp, Artificial Sequence
  Synthetic: descartes_5282_RAG1
gctgaagactcttcctcttg

SEQ ID NO: 9370 - DNA, 20 bp, Artificial Sequence
  Synthetic: descartes_5283_RAG1
ccctcaaaggaatccttctt

SEQ ID NO: 9371 - DNA, 20 bp, Artificial Sequence
  Synthetic: descartes_5284_RAG1
ccatccacaggaccatggac

SEQ ID NO: 9372 - DNA, 20 bp, Artificial Sequence
  Synthetic: descartes_5285_RAG1
gcagtgccccatgtgaggtt

SEQ ID NO: 9373 - DNA, 20 bp, Artificial Sequence
  Synthetic: descartes_5286_RAG1
attgagacagtcccttccat

SEQ ID NO: 9374 - DNA, 20 bp, Artificial Sequence
  Synthetic: descartes_5287_RAG2
ggaggacattcacttgccaa

SEQ ID NO: 9375 - DNA, 20 bp, Artificial Sequence
  Synthetic: descartes_5288_RAG2
ggtgtgctacatcatacatt

SEQ ID NO: 9376 - DNA, 20 bp, Artificial Sequence
  Synthetic: descartes_5289_RAG2
cctcggctgtacaccacatt

SEQ ID NO: 9377 - DNA, 20 bp, Artificial Sequence
  Synthetic: descartes_5290_RAG2
ccatgttgcttccaaaccat

SEQ ID NO: 9378 - DNA, 20 bp, Artificial Sequence
  Synthetic: descartes_5291_RAG2
gctgcacagagaaagacttg

SEQ ID NO: 9379 - DNA, 20 bp, Artificial Sequence
  Synthetic: descartes_5292_RAG2
gcaatagagacatgaaaaga

SEQ ID NO: 9380 - DNA, 20 bp, Artificial Sequence
  Synthetic: descartes_5293_RAG2
gaagcaacatgggaaatgga

SEQ ID NO: 9381 - DNA, 20 bp, Artificial Sequence
  Synthetic: descartes_5294_RAG2
cctccatggatgatgtattg

SEQ ID NO: 9382 - DNA, 20 bp, Artificial Sequence
  Synthetic: descartes_5295_RAI1
cctacagccagcagccgctc

SEQ ID NO: 9383 - DNA, 20 bp, Artificial Sequence
  Synthetic: descartes_5296_RAI1
gcagaggcagcaaacaaggc

SEQ ID NO: 9384 - DNA, 20 bp, Artificial Sequence
  Synthetic: descartes_5297_RAI1
catggcaaacaacagaacta

SEQ ID NO: 9385 - DNA, 20 bp, Artificial Sequence
  Synthetic: descartes_5298_RAI1
gtgcgtgaccgaaggatcat

SEQ ID NO: 9386 - DNA, 20 bp, Artificial Sequence
  Synthetic: descartes_5299_RAI1
ccatggaaaccacacctttc

SEQ ID NO: 9387 - DNA, 20 bp, Artificial Sequence
  Synthetic: descartes_5300_RAI1
caaggccctgagtacctctt

SEQ ID NO: 9388 - DNA, 20 bp, Artificial Sequence
  Synthetic: descartes_5301_RAI1
ctgcgaggtctgctggtagt

SEQ ID NO: 9389 - DNA, 20 bp, Artificial Sequence
  Synthetic: descartes_5302_RAI1
tgcataacggatcagcccca

SEQ ID NO: 9390 - DNA, 20 bp, Artificial Sequence
  Synthetic: descartes_5303_RASAL3
gcaccagaccatccagcacc

SEQ ID NO: 9391 - DNA, 20 bp, Artificial Sequence
  Synthetic: descartes_5304_RASAL3
attcagagcacaacctaaca

SEQ ID NO: 9392 - DNA, 20 bp, Artificial Sequence
  Synthetic: descartes_5305_RASAL3
ccggaacagcagcgcctcac

SEQ ID NO: 9393 - DNA, 20 bp, Artificial Sequence
  Synthetic: descartes_5306_RASAL3
agactgtgcccttcattgct

SEQ ID NO: 9394 - DNA, 20 bp, Artificial Sequence
  Synthetic: descartes_5307_RASAL3
gaagacctcctcgcagctgt

SEQ ID NO: 9395 - DNA, 20 bp, Artificial Sequence
  Synthetic: descartes_5308_RASAL3
ctggggtccacttcacagtc

SEQ ID NO: 9396 - DNA, 20 bp, Artificial Sequence
  Synthetic: descartes_5309_RASAL3
ggtgctcagcgactccacga

SEQ ID NO: 9397 - DNA, 20 bp, Artificial Sequence
  Synthetic: descartes_5310_RASAL3
gtttggcaccagaccatcca

SEQ ID NO: 9398 - DNA, 20 bp, Artificial Sequence
  Synthetic: descartes_5311_RBCK1
gaagagtgtggaggggtgtc

SEQ ID NO: 9399 - DNA, 20 bp, Artificial Sequence
  Synthetic: descartes_5312_RBCK1
agcaatggagatgcccaggt

SEQ ID NO: 9400 - DNA, 20 bp, Artificial Sequence
  Synthetic: descartes_5313_RBCK1
tggactatggcttcccacca

SEQ ID NO: 9401 - DNA, 20 bp, Artificial Sequence
  Synthetic: descartes_5314_RBCK1
agctatgctctttagaagag

SEQ ID NO: 9402 - DNA, 20 bp, Artificial Sequence
  Synthetic: descartes_5315_RBCK1
ccctgcagcggcagcccccg

SEQ ID NO: 9403 - DNA, 20 bp, Artificial Sequence
  Synthetic: descartes_5316_RBCK1
cacgtcaactgcctgctctg

SEQ ID NO: 9404 - DNA, 20 bp, Artificial Sequence
  Synthetic: descartes_5317_RBCK1
tagacctgggcatctccatt

SEQ ID NO: 9405 - DNA, 20 bp, Artificial Sequence
  Synthetic: descartes_5318_RBCK1
aggatgatgtcaatgagttc

SEQ ID NO: 9406 - DNA, 20 bp, Artificial Sequence
  Synthetic: descartes_5319_RBPJ
ccttaaggatacagaaagaa

SEQ ID NO: 9407 - DNA, 20 bp, Artificial Sequence
  Synthetic: descartes_5320_RBPJ
ggtggaggccgctcaccaaa

SEQ ID NO: 9408 - DNA, 20 bp, Artificial Sequence
  Synthetic: descartes_5321_RBPJ
gggatgtagaagctgaaact

SEQ ID NO: 9409 - DNA, 20 bp, Artificial Sequence
  Synthetic: descartes_5322_RBPJ
gcttgtctgagtcagatata

SEQ ID NO: 9410 - DNA, 20 bp, Artificial Sequence
  Synthetic: descartes_5323_RBPJ
gtgagcggcctccacctaaa

SEQ ID NO: 9411 - DNA, 20 bp, Artificial Sequence
  Synthetic: descartes_5324_RBPJ
cccacctccttgtgtatatc

SEQ ID NO: 9412 - DNA, 20 bp, Artificial Sequence
  Synthetic: descartes_5325_RBPJ
agcttctacatccccaaacc

SEQ ID NO: 9413 - DNA, 20 bp, Artificial Sequence
  Synthetic: descartes_5326_RBPJ
ggaccaaagttactggaacc

SEQ ID NO: 9414 - DNA, 20 bp, Artificial Sequence
  Synthetic: descartes_5327_RC3H1
gtgccatctcacgaacttcc

SEQ ID NO: 9415 - DNA, 20 bp, Artificial Sequence
  Synthetic: descartes_5328_RC3H1
accagaccactatcaataca

SEQ ID NO: 9416 - DNA, 20 bp, Artificial Sequence
  Synthetic: descartes_5329_RC3H1
atgtccagagaacactggtt

SEQ ID NO: 9417 - DNA, 20 bp, Artificial Sequence
  Synthetic: descartes_5330_RC3H1
gatgaagacttgaaggtagc

SEQ ID NO: 9418 - DNA, 20 bp, Artificial Sequence
  Synthetic: descartes_5331_RC3H1
ccagctaccttcaagtcttc

SEQ ID NO: 9419 - DNA, 20 bp, Artificial Sequence
  Synthetic: descartes_5332_RC3H1
gagaccgaccaacagtgtct

SEQ ID NO: 9420 - DNA, 20 bp, Artificial Sequence
  Synthetic: descartes_5333_RC3H1
ctggtttcagactagaatca

SEQ ID NO: 9421 - DNA, 20 bp, Artificial Sequence
  Synthetic: descartes_5334_RC3H1
tggagaccagtctcacaaat

SEQ ID NO: 9422 - DNA, 20 bp, Artificial Sequence
  Synthetic: descartes_5335_RC3H2
gtatctgttgcatcttctgt

SEQ ID NO: 9423 - DNA, 20 bp, Artificial Sequence
  Synthetic: descartes_5336_RC3H2
gtgatggacccatcatctca

SEQ ID NO: 9424 - DNA, 20 bp, Artificial Sequence
  Synthetic: descartes_5337_RC3H2
atgagaatgtgcacaaaccc

SEQ ID NO: 9425 - DNA, 20 bp, Artificial Sequence
  Synthetic: descartes_5338_RC3H2
agatgatgggtccatcacta

SEQ ID NO: 9426 - DNA, 20 bp, Artificial Sequence
  Synthetic: descartes_5339_RC3H2
gccagccactcccagtgtct

SEQ ID NO: 9427 - DNA, 20 bp, Artificial Sequence
  Synthetic: descartes_5340_RC3H2
agtagagtgccaaatcctca

SEQ ID NO: 9428 - DNA, 20 bp, Artificial Sequence
  Synthetic: descartes_5341_RC3H2
acctgaacagtggtcctctc

SEQ ID NO: 9429 - DNA, 20 bp, Artificial Sequence
  Synthetic: descartes_5342_RC3H2
taactagagtaccagtatat

SEQ ID NO: 9430 - DNA, 20 bp, Artificial Sequence
  Synthetic: descartes_5343_RCN1
ctgggaagaatacaaacaag

SEQ ID NO: 9431 - DNA, 20 bp, Artificial Sequence
  Synthetic: descartes_5344_RCN1
ccatgaggagaatggccctg

SEQ ID NO: 9432 - DNA, 20 bp, Artificial Sequence
  Synthetic: descartes_5345_RCN1
aaggtgtgatgatctgaaga

SEQ ID NO: 9433 - DNA, 20 bp, Artificial Sequence
  Synthetic: descartes_5346_RCN1
agctcctcagtagtgacaaa

SEQ ID NO: 9434 - DNA, 20 bp, Artificial Sequence
  Synthetic: descartes_5347_RCN1
tcggaagccaagctaccaat

SEQ ID NO: 9435 - DNA, 20 bp, Artificial Sequence
  Synthetic: descartes_5348_RCN1
tcatccttgtccctatcata

SEQ ID NO: 9436 - DNA, 20 bp, Artificial Sequence
  Synthetic: descartes_5349_RCN1
atgattcttcagatcatcac

SEQ ID NO: 9437 - DNA, 20 bp, Artificial Sequence
  Synthetic: descartes_5350_RCN1
cttcatatgttcaaactctt

SEQ ID NO: 9438 - DNA, 20 bp, Artificial Sequence
  Synthetic: descartes_5351_RELA
ggttcactcggcagatcttg

SEQ ID NO: 9439 - DNA, 20 bp, Artificial Sequence
  Synthetic: descartes_5352_RELA
cgtcatccctgagcaccatc

SEQ ID NO: 9440 - DNA, 20 bp, Artificial Sequence
  Synthetic: descartes_5353_RELA
gcaagctgatgtgcaccgac

SEQ ID NO: 9441 - DNA, 20 bp, Artificial Sequence
  Synthetic: descartes_5354_RELA
ccaccatggtgtttccttct

SEQ ID NO: 9442 - DNA, 20 bp, Artificial Sequence
  Synthetic: descartes_5355_RELA
acgggaccaggctgggaggc

SEQ ID NO: 9443 - DNA, 20 bp, Artificial Sequence
  Synthetic: descartes_5356_RELA
aggagatgaagacttctcct

SEQ ID NO: 9444 - DNA, 20 bp, Artificial Sequence
  Synthetic: descartes_5357_RELA
agcagctgctgaaccagggc

SEQ ID NO: 9445 - DNA, 20 bp, Artificial Sequence
  Synthetic: descartes_5358_RELA
cttctgggcagatcagccag

SEQ ID NO: 9446 - DNA, 20 bp, Artificial Sequence
  Synthetic: descartes_5359_RELB
cctacgaccctacggccccc

SEQ ID NO: 9447 - DNA, 20 bp, Artificial Sequence
  Synthetic: descartes_5360_RELB
acaacctgggcatccagtgt

SEQ ID NO: 9448 - DNA, 20 bp, Artificial Sequence
  Synthetic: descartes_5361_RELB
ttccgccgtttgctctcgat

SEQ ID NO: 9449 - DNA, 20 bp, Artificial Sequence
  Synthetic: descartes_5362_RELB
ccgaattaacaaggaaagcg

SEQ ID NO: 9450 - DNA, 20 bp, Artificial Sequence
  Synthetic: descartes_5363_RELB
cttgttaattcggcaaatcc

SEQ ID NO: 9451 - DNA, 20 bp, Artificial Sequence
  Synthetic: descartes_5364_RELB
ggggcggcctcctatccccg

SEQ ID NO: 9452 - DNA, 20 bp, Artificial Sequence
  Synthetic: descartes_5365_RELB
cccacgaggctgtgggggtg

SEQ ID NO: 9453 - DNA, 20 bp, Artificial Sequence
  Synthetic: descartes_5366_RELB
cgcttcttgtccacgccgta

SEQ ID NO: 9454 - DNA, 20 bp, Artificial Sequence
  Synthetic: descartes_5367_RFTN1
agtggcgattctccagagaa

SEQ ID NO: 9455 - DNA, 20 bp, Artificial Sequence
  Synthetic: descartes_5368_RFTN1
ccatgtctccagctttggaa

SEQ ID NO: 9456 - DNA, 20 bp, Artificial Sequence
  Synthetic: descartes_5369_RFTN1
cacagaagatagcaaaacca

SEQ ID NO: 9457 - DNA, 20 bp, Artificial Sequence
  Synthetic: descartes_5370_RFTN1
tgaggtagacaaggtctctg

SEQ ID NO: 9458 - DNA, 20 bp, Artificial Sequence
  Synthetic: descartes_5371_RFTN1
tcccagccggagcactgcac

SEQ ID NO: 9459 - DNA, 20 bp, Artificial Sequence
  Synthetic: descartes_5372_RFTN1
gacgccaactggttagagca

SEQ ID NO: 9460 - DNA, 20 bp, Artificial Sequence
  Synthetic: descartes_5373_RFTN1
aacaaaccgaagagccatca

SEQ ID NO: 9461 - DNA, 20 bp, Artificial Sequence
  Synthetic: descartes_5374_RFTN1
gagccatcctgatcaagaaa

SEQ ID NO: 9462 - DNA, 20 bp, Artificial Sequence
  Synthetic: descartes_5375_RGS16
ctgccccactcgaacttgcc

SEQ ID NO: 9463 - DNA, 20 bp, Artificial Sequence
  Synthetic: descartes_5376_RGS16
ggggcctcactgcaaatgaa

SEQ ID NO: 9464 - DNA, 20 bp, Artificial Sequence
  Synthetic: descartes_5377_RGS16
ctgctcagcagcaggtcgaa

SEQ ID NO: 9465 - DNA, 20 bp, Artificial Sequence
  Synthetic: descartes_5378_RGS16
ctgaagacagagttcagtga

SEQ ID NO: 9466 - DNA, 20 bp, Artificial Sequence
  Synthetic: descartes_5379_RGS16
tgaagaaagatccccagacg

SEQ ID NO: 9467 - DNA, 20 bp, Artificial Sequence
  Synthetic: descartes_5380_RGS16
atgcggctcaggggaagaca

SEQ ID NO: 9468 - DNA, 20 bp, Artificial Sequence
  Synthetic: descartes_5381_RGS16
ctgtgtttactgccccactc

SEQ ID NO: 9469 - DNA, 20 bp, Artificial Sequence
  Synthetic: descartes_5382_RGS16
ttcacaaatcagagctgggc

SEQ ID NO: 9470 - DNA, 20 bp, Artificial Sequence
  Synthetic: descartes_5383_RIF1
actgtaacagttgatgaaat

SEQ ID NO: 9471 - DNA, 20 bp, Artificial Sequence
  Synthetic: descartes_5384_RIF1
gctgtgtctgcttcagagtc

SEQ ID NO: 9472 - DNA, 20 bp, Artificial Sequence
  Synthetic: descartes_5385_RIF1
ggtggaatggccacaatccc

SEQ ID NO: 9473 - DNA, 20 bp, Artificial Sequence
  Synthetic: descartes_5386_RIF1
cccacagcaatcacaacctt

SEQ ID NO: 9474 - DNA, 20 bp, Artificial Sequence
  Synthetic: descartes_5387_RIF1
ggatcatagaaggcaaagaa

SEQ ID NO: 9475 - DNA, 20 bp, Artificial Sequence
  Synthetic: descartes_5388_RIF1
gatgaacatcatagtgtgaa

SEQ ID NO: 9476 - DNA, 20 bp, Artificial Sequence
  Synthetic: descartes_5389_RIF1
gtagtggagcacccatgatt

SEQ ID NO: 9477 - DNA, 20 bp, Artificial Sequence
  Synthetic: descartes_5390_RIF1
gcacaaacaaagaataaaaa

SEQ ID NO: 9478 - DNA, 20 bp, Artificial Sequence
  Synthetic: descartes_5391_RIOX1
ggaggggtctgccccgagac

SEQ ID NO: 9479 - DNA, 20 bp, Artificial Sequence
  Synthetic: descartes_5392_RIOX1
gctgtgcttcaagagcagtt

SEQ ID NO: 9480 - DNA, 20 bp, Artificial Sequence
  Synthetic: descartes_5393_RIOX1
cctcacgccccctaactcgc

SEQ ID NO: 9481 - DNA, 20 bp, Artificial Sequence
  Synthetic: descartes_5394_RIOX1
actgatagggagagggcact

SEQ ID NO: 9482 - DNA, 20 bp, Artificial Sequence
  Synthetic: descartes_5395_RIOX1
cactgtgtaatagagaaaca

SEQ ID NO: 9483 - DNA, 20 bp, Artificial Sequence
  Synthetic: descartes_5396_RIOX1
gaagcatggcaggctccaac

SEQ ID NO: 9484 - DNA, 20 bp, Artificial Sequence
  Synthetic: descartes_5397_RIOX1
tctaccgctgacctggattc

SEQ ID NO: 9485 - DNA, 20 bp, Artificial Sequence
  Synthetic: descartes_5398_RIOX1
ctaccttccagctgcagcac

SEQ ID NO: 9486 - DNA, 20 bp, Artificial Sequence
  Synthetic: descartes_5399_RIOX2
aagaccacattgtcctcaca

SEQ ID NO: 9487 - DNA, 20 bp, Artificial Sequence
  Synthetic: descartes_5400_RIOX2
ccatcatgtgtgtctctcta

SEQ ID NO: 9488 - DNA, 20 bp, Artificial Sequence
  Synthetic: descartes_5401_RIOX2
atctcgcccatcaagacaga

SEQ ID NO: 9489 - DNA, 20 bp, Artificial Sequence
  Synthetic: descartes_5402_RIOX2
tgtcaaggacctgaaactta

SEQ ID NO: 9490 - DNA, 20 bp, Artificial Sequence
  Synthetic: descartes_5403_RIOX2
gaggatccaggagaagctgg

SEQ ID NO: 9491 - DNA, 20 bp, Artificial Sequence
  Synthetic: descartes_5404_RIOX2
gatgcactgaagcaaatttg

SEQ ID NO: 9492 - DNA, 20 bp, Artificial Sequence
  Synthetic: descartes_5405_RIOX2
aataaagatggcaaagcaca

SEQ ID NO: 9493 - DNA, 20 bp, Artificial Sequence
  Synthetic: descartes_5406_RIOX2
ccagaggaaccattcatcaa

SEQ ID NO: 9494 - DNA, 20 bp, Artificial Sequence
  Synthetic: descartes_5407_RIPK2
gctgaataacagcttcaaga

SEQ ID NO: 9495 - DNA, 20 bp, Artificial Sequence
  Synthetic: descartes_5408_RIPK2
atggagctgagaggatccac

SEQ ID NO: 9496 - DNA, 20 bp, Artificial Sequence
  Synthetic: descartes_5409_RIPK2
ggaatagttactgaatacat

SEQ ID NO: 9497 - DNA, 20 bp, Artificial Sequence
  Synthetic: descartes_5410_RIPK2
ccatatgatatacctcaccg

SEQ ID NO: 9498 - DNA, 20 bp, Artificial Sequence
  Synthetic: descartes_5411_RIPK2
tggataacacttcccatgtg

SEQ ID NO: 9499 - DNA, 20 bp, Artificial Sequence
  Synthetic: descartes_5412_RIPK2
caggtatgttcagagataat

SEQ ID NO: 9500 - DNA, 20 bp, Artificial Sequence
  Synthetic: descartes_5413_RIPK2
aagatggtgatctagaaacc

SEQ ID NO: 9501 - DNA, 20 bp, Artificial Sequence
  Synthetic: descartes_5414_RIPK2
atgcaggatgcgaaatctca

SEQ ID NO: 9502 - DNA, 20 bp, Artificial Sequence
  Synthetic: descartes_5415_RIPK3
cctgcacgaccagaacccgg

SEQ ID NO: 9503 - DNA, 20 bp, Artificial Sequence
  Synthetic: descartes_5416_RIPK3
ggagaaccatagaaaaccag

SEQ ID NO: 9504 - DNA, 20 bp, Artificial Sequence
  Synthetic: descartes_5417_RIPK3
tgagtggctaaacaaactga

SEQ ID NO: 9505 - DNA, 20 bp, Artificial Sequence
  Synthetic: descartes_5418_RIPK3
ggaacagagctgggaggctc

SEQ ID NO: 9506 - DNA, 20 bp, Artificial Sequence
  Synthetic: descartes_5419_RIPK3
gccactcagaaaccatgaca

SEQ ID NO: 9507 - DNA, 20 bp, Artificial Sequence
  Synthetic: descartes_5420_RIPK3
agggaggctcacagtcaggg

SEQ ID NO: 9508 - DNA, 20 bp, Artificial Sequence
  Synthetic: descartes_5421_RIPK3
gtcaccagagccggcttggg

SEQ ID NO: 9509 - DNA, 20 bp, Artificial Sequence
  Synthetic: descartes_5422_RIPK3
ccgctatgattataccaacc

SEQ ID NO: 9510 - DNA, 20 bp, Artificial Sequence
  Synthetic: descartes_5423_RNF11
tgccgtgcatgcacatctat

SEQ ID NO: 9511 - DNA, 20 bp, Artificial Sequence
  Synthetic: descartes_5424_RNF11
tggggacccaattcgatttc

SEQ ID NO: 9512 - DNA, 20 bp, Artificial Sequence
  Synthetic: descartes_5425_RNF11
ggcagatgttgtataagacc

SEQ ID NO: 9513 - DNA, 20 bp, Artificial Sequence
  Synthetic: descartes_5426_RNF11
tgatccatctcttccagggt

SEQ ID NO: 9514 - DNA, 20 bp, Artificial Sequence
  Synthetic: descartes_5427_RNF11
tgaccctggaagagatggat

SEQ ID NO: 9515 - DNA, 20 bp, Artificial Sequence
  Synthetic: descartes_5428_RNF11
gcgaggggacggagccggat

SEQ ID NO: 9516 - DNA, 20 bp, Artificial Sequence
  Synthetic: descartes_5429_RNF11
ttcctcttcagtcagctgag

SEQ ID NO: 9517 - DNA, 20 bp, Artificial Sequence
  Synthetic: descartes_5430_RNF11
agctatcctaatttgttcct

SEQ ID NO: 9518 - DNA, 20 bp, Artificial Sequence
  Synthetic: descartes_5431_RNF125
gctacatcagttgctggaac

SEQ ID NO: 9519 - DNA, 20 bp, Artificial Sequence
  Synthetic: descartes_5432_RNF125
atacccgatgagaatccaag

SEQ ID NO: 9520 - DNA, 20 bp, Artificial Sequence
  Synthetic: descartes_5433_RNF125
atataattgaggaagctctt

SEQ ID NO: 9521 - DNA, 20 bp, Artificial Sequence
  Synthetic: descartes_5434_RNF125
ataagacatctgcaagttag

SEQ ID NO: 9522 - DNA, 20 bp, Artificial Sequence
  Synthetic: descartes_5435_RNF125
cctcagtgaaatgagggcac

SEQ ID NO: 9523 - DNA, 20 bp, Artificial Sequence
  Synthetic: descartes_5436_RNF125
gactggtagcaatacaggaa

SEQ ID NO: 9524 - DNA, 20 bp, Artificial Sequence
  Synthetic: descartes_5437_RNF125
tcagagggaactgtatgaag

SEQ ID NO: 9525 - DNA, 20 bp, Artificial Sequence
  Synthetic: descartes_5438_RNF125
ccgctgtcggtgctcagcac

SEQ ID NO: 9526 - DNA, 20 bp, Artificial Sequence
  Synthetic: descartes_5439_RNF168
ggtcagcctcacactctgaa

SEQ ID NO: 9527 - DNA, 20 bp, Artificial Sequence
  Synthetic: descartes_5440_RNF168
agagacataaacaagaagaa

SEQ ID NO: 9528 - DNA, 20 bp, Artificial Sequence
  Synthetic: descartes_5441_RNF168
gataccttacagtgatctct

SEQ ID NO: 9529 - DNA, 20 bp, Artificial Sequence
  Synthetic: descartes_5442_RNF168
catgcagatcccgcactggc

SEQ ID NO: 9530 - DNA, 20 bp, Artificial Sequence
  Synthetic: descartes_5443_RNF168
tgtgagggaagtatctcggc

SEQ ID NO: 9531 - DNA, 20 bp, Artificial Sequence
  Synthetic: descartes_5444_RNF168
ctgagcagacgaactggctg

SEQ ID NO: 9532 - DNA, 20 bp, Artificial Sequence
  Synthetic: descartes_5445_RNF168
ggtcgctcgtgacttaagac

SEQ ID NO: 9533 - DNA, 20 bp, Artificial Sequence
  Synthetic: descartes_5446_RNF168
agatgtttcagagatgcaca

SEQ ID NO: 9534 - DNA, 20 bp, Artificial Sequence
  Synthetic: descartes_5447_RNF17
ggtactacaaatatagttcc

SEQ ID NO: 9535 - DNA, 20 bp, Artificial Sequence
  Synthetic: descartes_5448_RNF17
agttaacaaccactgaacat

SEQ ID NO: 9536 - DNA, 20 bp, Artificial Sequence
  Synthetic: descartes_5449_RNF17
cttagaaccagacataaatc

SEQ ID NO: 9537 - DNA, 20 bp, Artificial Sequence
  Synthetic: descartes_5450_RNF17
agtgaatccatgatctaaat

SEQ ID NO: 9538 - DNA, 20 bp, Artificial Sequence
  Synthetic: descartes_5451_RNF17
gctacacaggcttgatcttg

SEQ ID NO: 9539 - DNA, 20 bp, Artificial Sequence
  Synthetic: descartes_5452_RNF17
aatgcagctatgaacatagc

SEQ ID NO: 9540 - DNA, 20 bp, Artificial Sequence
  Synthetic: descartes_5453_RNF17
cttgaagacagtctatcata

SEQ ID NO: 9541 - DNA, 20 bp, Artificial Sequence
  Synthetic: descartes_5454_RNF17
gcttcctcttcccagccttc

SEQ ID NO: 9542 - DNA, 20 bp, Artificial Sequence
  Synthetic: descartes_5455_RNF19B
gctgtaaggaccttgcataa

SEQ ID NO: 9543 - DNA, 20 bp, Artificial Sequence
  Synthetic: descartes_5456_RNF19B
gctatcactggaggagtgac

SEQ ID NO: 9544 - DNA, 20 bp, Artificial Sequence
  Synthetic: descartes_5457_RNF19B
atacaaagccaacagaattc

SEQ ID NO: 9545 - DNA, 20 bp, Artificial Sequence
  Synthetic: descartes_5458_RNF19B
cccaaagacacagccagtct

SEQ ID NO: 9546 - DNA, 20 bp, Artificial Sequence
  Synthetic: descartes_5459_RNF19B
gcttcaatgtccacttggat

SEQ ID NO: 9547 - DNA, 20 bp, Artificial Sequence
  Synthetic: descartes_5460_RNF19B
cttccctcatacctgctgtg

SEQ ID NO: 9548 - DNA, 20 bp, Artificial Sequence
  Synthetic: descartes_5461_RNF19B
ccttgccactggagagaatg

SEQ ID NO: 9549 - DNA, 20 bp, Artificial Sequence
  Synthetic: descartes_5462_RNF19B
gatgccatatctgcttgcag

SEQ ID NO: 9550 - DNA, 20 bp, Artificial Sequence
  Synthetic: descartes_5463_RNF31
cctggagcagctccggccgc

SEQ ID NO: 9551 - DNA, 20 bp, Artificial Sequence
  Synthetic: descartes_5464_RNF31
actgtacccagtgccgccac

SEQ ID NO: 9552 - DNA, 20 bp, Artificial Sequence
  Synthetic: descartes_5465_RNF31
gctggagaggatccccctgc

SEQ ID NO: 9553 - DNA, 20 bp, Artificial Sequence
  Synthetic: descartes_5466_RNF31
cctgcctcagcccaaccacg

SEQ ID NO: 9554 - DNA, 20 bp, Artificial Sequence
  Synthetic: descartes_5467_RNF31
gcatggcacaggcagcacag

SEQ ID NO: 9555 - DNA, 20 bp, Artificial Sequence
  Synthetic: descartes_5468_RNF31
cttgccacaagcttcgtccc

SEQ ID NO: 9556 - DNA, 20 bp, Artificial Sequence
  Synthetic: descartes_5469_RNF31
ctgaagatacattgctaggc

SEQ ID NO: 9557 - DNA, 20 bp, Artificial Sequence
  Synthetic: descartes_5470_RNF31
accctgcagttaggctctgg

SEQ ID NO: 9558 - DNA, 20 bp, Artificial Sequence
  Synthetic: descartes_5471_RNF8
gagatagcccaaggagaaaa

SEQ ID NO: 9559 - DNA, 20 bp, Artificial Sequence
  Synthetic: descartes_5472_RNF8
gtgtcacataccaactggta

SEQ ID NO: 9560 - DNA, 20 bp, Artificial Sequence
  Synthetic: descartes_5473_RNF8
actggctgaccagattcaca

SEQ ID NO: 9561 - DNA, 20 bp, Artificial Sequence
  Synthetic: descartes_5474_RNF8
ccctggcttccccaaagtca

SEQ ID NO: 9562 - DNA, 20 bp, Artificial Sequence
  Synthetic: descartes_5475_RNF8
aggtgaccatgtccaggatt

SEQ ID NO: 9563 - DNA, 20 bp, Artificial Sequence
  Synthetic: descartes_5476_RNF8
gctgaacagagcgcgtctgg

SEQ ID NO: 9564 - DNA, 20 bp, Artificial Sequence
  Synthetic: descartes_5477_RNF8
caggaagaggaacagcatct

SEQ ID NO: 9565 - DNA, 20 bp, Artificial Sequence
  Synthetic: descartes_5478_RNF8
cagaggcactccaagttgga

SEQ ID NO: 9566 - DNA, 20 bp, Artificial Sequence
  Synthetic: descartes_5479_RORA
ggattctccaaatactccat

SEQ ID NO: 9567 - DNA, 20 bp, Artificial Sequence
  Synthetic: descartes_5480_RORA
aggagaagtcagcaaagcaa

SEQ ID NO: 9568 - DNA, 20 bp, Artificial Sequence
  Synthetic: descartes_5481_RORA
caggaagaaattgagaacta

SEQ ID NO: 9569 - DNA, 20 bp, Artificial Sequence
  Synthetic: descartes_5482_RORA
atggcacacaattgccacat

SEQ ID NO: 9570 - DNA, 20 bp, Artificial Sequence
  Synthetic: descartes_5483_RORA
gcaaactccaccacatactg

SEQ ID NO: 9571 - DNA, 20 bp, Artificial Sequence
  Synthetic: descartes_5484_RORA
tgtgctcaagttgagaccag

SEQ ID NO: 9572 - DNA, 20 bp, Artificial Sequence
  Synthetic: descartes_5485_RORA
gccgaatgtcaaaaaagcag

SEQ ID NO: 9573 - DNA, 20 bp, Artificial Sequence
  Synthetic: descartes_5486_RORA
tactggttcgatcaatcaaa

SEQ ID NO: 9574 - DNA, 20 bp, Artificial Sequence
  Synthetic: descartes_5487_RORC
cctccactctacaaggagct

SEQ ID NO: 9575 - DNA, 20 bp, Artificial Sequence
  Synthetic: descartes_5488_RORC
agtgctgaagagctccttgt

SEQ ID NO: 9576 - DNA, 20 bp, Artificial Sequence
  Synthetic: descartes_5489_RORC
cgaggatgagattgccctct

SEQ ID NO: 9577 - DNA, 20 bp, Artificial Sequence
  Synthetic: descartes_5490_RORC
gcgatgagtcttgcagagat

SEQ ID NO: 9578 - DNA, 20 bp, Artificial Sequence
  Synthetic: descartes_5491_RORC
acttctcccactccctaagt

SEQ ID NO: 9579 - DNA, 20 bp, Artificial Sequence
  Synthetic: descartes_5492_RORC
cgcagcacaccggaggcacc

SEQ ID NO: 9580 - DNA, 20 bp, Artificial Sequence
  Synthetic: descartes_5493_RORC
aggaggccagggggacaggc

SEQ ID NO: 9581 - DNA, 20 bp, Artificial Sequence
  Synthetic: descartes_5494_RORC
ccttcaaaaaagaccgtgcg

SEQ ID NO: 9582 - DNA, 20 bp, Artificial Sequence
  Synthetic: descartes_5495_RPH3A
agacactcgtaccagtgttt

SEQ ID NO: 9583 - DNA, 20 bp, Artificial Sequence
  Synthetic: descartes_5496_RPH3A
agacgggccaactcagtcca

SEQ ID NO: 9584 - DNA, 20 bp, Artificial Sequence
  Synthetic: descartes_5497_RPH3A
ttgagggagaatctggtctc

SEQ ID NO: 9585 - DNA, 20 bp, Artificial Sequence
  Synthetic: descartes_5498_RPH3A
tatgacatcaaacacagtga

SEQ ID NO: 9586 - DNA, 20 bp, Artificial Sequence
  Synthetic: descartes_5499_RPH3A
agcgctctcccttggcagag

SEQ ID NO: 9587 - DNA, 20 bp, Artificial Sequence
  Synthetic: descartes_5500_RPH3A
gggaagcctttgaagaacca

SEQ ID NO: 9588 - DNA, 20 bp, Artificial Sequence
  Synthetic: descartes_5501_RPH3A
agtctgggactatgacatcg

SEQ ID NO: 9589 - DNA, 20 bp, Artificial Sequence
  Synthetic: descartes_5502_RPH3A
ttggtgagaccagattctcc

SEQ ID NO: 9590 - DNA, 20 bp, Artificial Sequence
  Synthetic: descartes_5503_RPS3
ccagacaccacaacctcgca

SEQ ID NO: 9591 - DNA, 20 bp, Artificial Sequence
  Synthetic: descartes_5504_RPS3
gctttccagagggcagtgta

SEQ ID NO: 9592 - DNA, 20 bp, Artificial Sequence
  Synthetic: descartes_5505_RPS3
aaggaagcaagggatatcct

SEQ ID NO: 9593 - DNA, 20 bp, Artificial Sequence
  Synthetic: descartes_5506_RPS3
gccctctgtcctcggagttt

SEQ ID NO: 9594 - DNA, 20 bp, Artificial Sequence
  Synthetic: descartes_5507_RPS3
tggatggcctgatgatccac

SEQ ID NO: 9595 - DNA, 20 bp, Artificial Sequence
  Synthetic: descartes_5508_RPS3
gccccactctccatgatgaa

SEQ ID NO: 9596 - DNA, 20 bp, Artificial Sequence
  Synthetic: descartes_5509_RPS3
tgtcctggttggtgtaactc

SEQ ID NO: 9597 - DNA, 20 bp, Artificial Sequence
  Synthetic: descartes_5510_RPS3
ggttccacaatgctcacgtg

SEQ ID NO: 9598 - DNA, 20 bp, Artificial Sequence
  Synthetic: descartes_5511_RPS6
cccatgaagcagggtgtctt

SEQ ID NO: 9599 - DNA, 20 bp, Artificial Sequence
  Synthetic: descartes_5512_RPS6
gcatattctgcagcctcttc

SEQ ID NO: 9600 - DNA, 20 bp, Artificial Sequence
  Synthetic: descartes_5513_RPS6
caataaccaagttgagaacg

SEQ ID NO: 9601 - DNA, 20 bp, Artificial Sequence
  Synthetic: descartes_5514_RPS6
cgttcatcgtccacttcaat

SEQ ID NO: 9602 - DNA, 20 bp, Artificial Sequence
  Synthetic: descartes_5515_RPS6
aatctctctaaagaagatga

SEQ ID NO: 9603 - DNA, 20 bp, Artificial Sequence
  Synthetic: descartes_5516_RPS6
tatgagaagcgtatggccac

SEQ ID NO: 9604 - DNA, 20 bp, Artificial Sequence
  Synthetic: descartes_5517_RPS6
catccacaatgcaaccacga

SEQ ID NO: 9605 - DNA, 20 bp, Artificial Sequence
  Synthetic: descartes_5518_RPS6
tgactggattcagacttaga

SEQ ID NO: 9606 - DNA, 20 bp, Artificial Sequence
  Synthetic: descartes_5519_RSAD2
gctgtgtggaaacagaagcc

SEQ ID NO: 9607 - DNA, 20 bp, Artificial Sequence
  Synthetic: descartes_5520_RSAD2
cacacagccaaaacatcctt

SEQ ID NO: 9608 - DNA, 20 bp, Artificial Sequence
  Synthetic: descartes_5521_RSAD2
aacgtggaagaggacatgac

SEQ ID NO: 9609 - DNA, 20 bp, Artificial Sequence
  Synthetic: descartes_5522_RSAD2
tgaagcgaggaggaaaatac

SEQ ID NO: 9610 - DNA, 20 bp, Artificial Sequence
  Synthetic: descartes_5523_RSAD2
tcttgaaagcgactctataa

SEQ ID NO: 9611 - DNA, 20 bp, Artificial Sequence
  Synthetic: descartes_5524_RSAD2
aggtggagagccatttcttc

SEQ ID NO: 9612 - DNA, 20 bp, Artificial Sequence
  Synthetic: descartes_5525_RSAD2
ctgggaagctcttgagtgtg

SEQ ID NO: 9613 - DNA, 20 bp, Artificial Sequence
  Synthetic: descartes_5526_RSAD2
acgaggaagtcaatgtcctt

SEQ ID NO: 9614 - DNA, 20 bp, Artificial Sequence
  Synthetic: descartes_5527_RSF1
gatgaagaaagaaaagaaaa

SEQ ID NO: 9615 - DNA, 20 bp, Artificial Sequence
  Synthetic: descartes_5528_RSF1
agacagaaccaatagagaca

SEQ ID NO: 9616 - DNA, 20 bp, Artificial Sequence
  Synthetic: descartes_5529_RSF1
actatggatctctaagactg

SEQ ID NO: 9617 - DNA, 20 bp, Artificial Sequence
  Synthetic: descartes_5530_RSF1
acagtagtctcttctagaac

SEQ ID NO: 9618 - DNA, 20 bp, Artificial Sequence
  Synthetic: descartes_5531_RSF1
ccttcatgacccaaagcagt

SEQ ID NO: 9619 - DNA, 20 bp, Artificial Sequence
  Synthetic: descartes_5532_RSF1
gatgttgccttaaagaagaa

SEQ ID NO: 9620 - DNA, 20 bp, Artificial Sequence
  Synthetic: descartes_5533_RSF1
actgccagacccttcacttt

SEQ ID NO: 9621 - DNA, 20 bp, Artificial Sequence
  Synthetic: descartes_5534_RSF1
atcagacacaacaaactcat

SEQ ID NO: 9622 - DNA, 20 bp, Artificial Sequence
  Synthetic: descartes_5535_RYR1
gccggagtggacaagaaata

SEQ ID NO: 9623 - DNA, 20 bp, Artificial Sequence
  Synthetic: descartes_5536_RYR1
gtgaggaaccgcctgaagaa

SEQ ID NO: 9624 - DNA, 20 bp, Artificial Sequence
  Synthetic: descartes_5537_RYR1
aatggaagacgagtccagtt

SEQ ID NO: 9625 - DNA, 20 bp, Artificial Sequence
  Synthetic: descartes_5538_RYR1
gtgagctccgagaccaacaa

SEQ ID NO: 9626 - DNA, 20 bp, Artificial Sequence
  Synthetic: descartes_5539_RYR1
ggagcctgagtcagacatga

SEQ ID NO: 9627 - DNA, 20 bp, Artificial Sequence
  Synthetic: descartes_5540_RYR1
cgtatgacgcccctgtacaa

SEQ ID NO: 9628 - DNA, 20 bp, Artificial Sequence
  Synthetic: descartes_5541_RYR1
ccctgctgacagtgatgacc

SEQ ID NO: 9629 - DNA, 20 bp, Artificial Sequence
  Synthetic: descartes_5542_RYR1
tctgccttagatgagtatga

SEQ ID NO: 9630 - DNA, 20 bp, Artificial Sequence
  Synthetic: descartes_5543_SAMSN1
agagaaggagaaacatcaaa

SEQ ID NO: 9631 - DNA, 20 bp, Artificial Sequence
  Synthetic: descartes_5544_SAMSN1
cccaaaccgcctccattatt

SEQ ID NO: 9632 - DNA, 20 bp, Artificial Sequence
  Synthetic: descartes_5545_SAMSN1
ctgatgagatatagcaacca

SEQ ID NO: 9633 - DNA, 20 bp, Artificial Sequence
  Synthetic: descartes_5546_SAMSN1
acgccaagtccctatgacac

SEQ ID NO: 9634 - DNA, 20 bp, Artificial Sequence
  Synthetic: descartes_5547_SAMSN1
ctgaaaaccctctctggaca

SEQ ID NO: 9635 - DNA, 20 bp, Artificial Sequence
  Synthetic: descartes_5548_SAMSN1
ggtaaaaaaatgagagctat

SEQ ID NO: 9636 - DNA, 20 bp, Artificial Sequence
  Synthetic: descartes_5549_SAMSN1
aggaaaaggcttccagtgat

SEQ ID NO: 9637 - DNA, 20 bp, Artificial Sequence
  Synthetic: descartes_5550_SAMSN1
tgtggatgtcatctcagaag

SEQ ID NO: 9638 - DNA, 20 bp, Artificial Sequence
  Synthetic: descartes_5551_SASH3
tgagcaagaggagcatgaac

SEQ ID NO: 9639 - DNA, 20 bp, Artificial Sequence
  Synthetic: descartes_5552_SASH3
aatgatctggatcacatctc

SEQ ID NO: 9640 - DNA, 20 bp, Artificial Sequence
  Synthetic: descartes_5553_SASH3
ccgaaccatgaacaggaaga

SEQ ID NO: 9641 - DNA, 20 bp, Artificial Sequence
  Synthetic: descartes_5554_SASH3
aaagagcccaccttgccatt

SEQ ID NO: 9642 - DNA, 20 bp, Artificial Sequence
  Synthetic: descartes_5555_SASH3
ccactcttcccagcatcttc

SEQ ID NO: 9643 - DNA, 20 bp, Artificial Sequence
  Synthetic: descartes_5556_SASH3
ccaaatccaaacccagctcc

SEQ ID NO: 9644 - DNA, 20 bp, Artificial Sequence
  Synthetic: descartes_5557_SASH3
gcaaaatccttgaagctgct

SEQ ID NO: 9645 - DNA, 20 bp, Artificial Sequence
  Synthetic: descartes_5558_SASH3
ttctgagtgggctccttctc

SEQ ID NO: 9646 - DNA, 20 bp, Artificial Sequence
  Synthetic: descartes_5559_SATB1
aatgtgaccacatgatacac

SEQ ID NO: 9647 - DNA, 20 bp, Artificial Sequence
  Synthetic: descartes_5560_SATB1
agtggaagccttgggaatcc

SEQ ID NO: 9648 - DNA, 20 bp, Artificial Sequence
  Synthetic: descartes_5561_SATB1
gaagagagtgtccaagataa

SEQ ID NO: 9649 - DNA, 20 bp, Artificial Sequence
  Synthetic: descartes_5562_SATB1
gaggtcgatgtggcagaata

SEQ ID NO: 9650 - DNA, 20 bp, Artificial Sequence
  Synthetic: descartes_5563_SATB1
actgaaaaaagggtgttagt

SEQ ID NO: 9651 - DNA, 20 bp, Artificial Sequence
  Synthetic: descartes_5564_SATB1
agtgaaactagaagaagagc

SEQ ID NO: 9652 - DNA, 20 bp, Artificial Sequence
  Synthetic: descartes_5565_SATB1
ataatgttccaccacacaga

SEQ ID NO: 9653 - DNA, 20 bp, Artificial Sequence
  Synthetic: descartes_5566_SATB1
tcttggacactctcttccaa

SEQ ID NO: 9654 - DNA, 20 bp, Artificial Sequence
  Synthetic: descartes_5567_SCGB1A1
ggggagggtgtccaccagct

SEQ ID NO: 9655 - DNA, 20 bp, Artificial Sequence
  Synthetic: descartes_5568_SCGB1A1
gatgacacgctgaaagctcg

SEQ ID NO: 9656 - DNA, 20 bp, Artificial Sequence
  Synthetic: descartes_5569_SCGB1A1
agccctgatcaagacatgag

SEQ ID NO: 9657 - DNA, 20 bp, Artificial Sequence
  Synthetic: descartes_5570_SCGB1A1
agcgtgtcatcgaaaccctc

SEQ ID NO: 9658 - DNA, 20 bp, Artificial Sequence
  Synthetic: descartes_5571_SCGB1A1
tctgggcttttgggggaggg

SEQ ID NO: 9659 - DNA, 20 bp, Artificial Sequence
  Synthetic: descartes_5572_SCMH1
cctgggacaaatacctaaaa

SEQ ID NO: 9660 - DNA, 20 bp, Artificial Sequence
  Synthetic: descartes_5573_SCMH1
tggtgataagcacagtcgat

SEQ ID NO: 9661 - DNA, 20 bp, Artificial Sequence
  Synthetic: descartes_5574_SCMH1
agctgagtcaaccagccgcc

SEQ ID NO: 9662 - DNA, 20 bp, Artificial Sequence
  Synthetic: descartes_5575_SCMH1
accgggaacagcataccctc

SEQ ID NO: 9663 - DNA, 20 bp, Artificial Sequence
  Synthetic: descartes_5576_SCMH1
gtttccaaaatgattccata

SEQ ID NO: 9664 - DNA, 20 bp, Artificial Sequence
  Synthetic: descartes_5577_SCMH1
ccatcccatctctgccccat

SEQ ID NO: 9665 - DNA, 20 bp, Artificial Sequence
  Synthetic: descartes_5578_SCMH1
acagttcccaataggctgga

SEQ ID NO: 9666 - DNA, 20 bp, Artificial Sequence
  Synthetic: descartes_5579_SCMH1
gcttgtgagattctctggga

SEQ ID NO: 9667 - DNA, 20 bp, Artificial Sequence
  Synthetic: descartes_5580_SCML2
acatgtcccaacaggttgta

SEQ ID NO: 9668 - DNA, 20 bp, Artificial Sequence
  Synthetic: descartes_5581_SCML2
gagaagctgcagatgtagaa

SEQ ID NO: 9669 - DNA, 20 bp, Artificial Sequence
  Synthetic: descartes_5582_SCML2
catggcccagaagcgacatc

SEQ ID NO: 9670 - DNA, 20 bp, Artificial Sequence
  Synthetic: descartes_5583_SCML2
aatgtagtaacacagcttta

SEQ ID NO: 9671 - DNA, 20 bp, Artificial Sequence
  Synthetic: descartes_5584_SCML2
gtttcaagggcacaatccac

SEQ ID NO: 9672 - DNA, 20 bp, Artificial Sequence
  Synthetic: descartes_5585_SCML2
gtgatgagctcttagaatct

SEQ ID NO: 9673 - DNA, 20 bp, Artificial Sequence
  Synthetic: descartes_5586_SCML2
gatacctgaagccagataat

SEQ ID NO: 9674 - DNA, 20 bp, Artificial Sequence
  Synthetic: descartes_5587_SCML2
ataccaactttgaaatcatt

SEQ ID NO: 9675 - DNA, 20 bp, Artificial Sequence
  Synthetic: descartes_5588_SDC4
ttgcccaggtcatagctgcc

SEQ ID NO: 9676 - DNA, 20 bp, Artificial Sequence
  Synthetic: descartes_5589_SDC4
ccgtcttcctgatcctactg

SEQ ID NO: 9677 - DNA, 20 bp, Artificial Sequence
  Synthetic: descartes_5590_SDC4
agctgtctggctctggagat

SEQ ID NO: 9678 - DNA, 20 bp, Artificial Sequence
  Synthetic: descartes_5591_SDC4
ttgtagatgggtttcttgcc

SEQ ID NO: 9679 - DNA, 20 bp, Artificial Sequence
  Synthetic: descartes_5592_SDC4
ttgggttcggtggggacttg

SEQ ID NO: 9680 - DNA, 20 bp, Artificial Sequence
  Synthetic: descartes_5593_SEC61A2
gctccagctaacaactgcat

SEQ ID NO: 9681 - DNA, 20 bp, Artificial Sequence
  Synthetic: descartes_5594_SEC61A2
ggtgtatctccaacttcaat

SEQ ID NO: 9682 - DNA, 20 bp, Artificial Sequence
  Synthetic: descartes_5595_SEC61A2
gctgaggaaccagacacttc

SEQ ID NO: 9683 - DNA, 20 bp, Artificial Sequence
  Synthetic: descartes_5596_SEC61A2
gaagttatcaaaccattctg

SEQ ID NO: 9684 - DNA, 20 bp, Artificial Sequence
  Synthetic: descartes_5597_SEC61A2
atggggtagctgctgtactg

SEQ ID NO: 9685 - DNA, 20 bp, Artificial Sequence
  Synthetic: descartes_5598_SEC61A2
ccagatgctgtctgttcgat

SEQ ID NO: 9686 - DNA, 20 bp, Artificial Sequence
  Synthetic: descartes_5599_SEC61A2
gagagaaggttctgtggact

SEQ ID NO: 9687 - DNA, 20 bp, Artificial Sequence
  Synthetic: descartes_5600_SEC61A2
caaaaaggatactcttctac

SEQ ID NO: 9688 - DNA, 20 bp, Artificial Sequence
  Synthetic: descartes_5601_SELENOK
acatcttgctgaagcagagt

SEQ ID NO: 9689 - DNA, 20 bp, Artificial Sequence
  Synthetic: descartes_5602_SELENOK
aaaactctgcttcagcaaga

SEQ ID NO: 9690 - DNA, 20 bp, Artificial Sequence
  Synthetic: descartes_5603_SELENOK
ttctggggaatagctgagtt

SEQ ID NO: 9691 - DNA, 20 bp, Artificial Sequence
  Synthetic: descartes_5604_SELENOK
ataacagatttcttctgggg

SEQ ID NO: 9692 - DNA, 20 bp, Artificial Sequence
  Synthetic: descartes_5605_SELENOK
catagcttcttctttttttc

SEQ ID NO: 9693 - DNA, 20 bp, Artificial Sequence
  Synthetic: descartes_5606_SEMA4A
cctccatgaccttgtcctcc

SEQ ID NO: 9694 - DNA, 20 bp, Artificial Sequence
  Synthetic: descartes_5607_SEMA4A
cccttaaagacacgttcaat

SEQ ID NO: 9695 - DNA, 20 bp, Artificial Sequence
  Synthetic: descartes_5608_SEMA4A
ataccctgtgatctcctact

SEQ ID NO: 9696 - DNA, 20 bp, Artificial Sequence
  Synthetic: descartes_5609_SEMA4A
gcctggggacccctggatcc

SEQ ID NO: 9697 - DNA, 20 bp, Artificial Sequence
  Synthetic: descartes_5610_SEMA4A
ttacaatgtcacccatctct

SEQ ID NO: 9698 - DNA, 20 bp, Artificial Sequence
  Synthetic: descartes_5611_SEMA4A
aggggaaatacaaagagttg

SEQ ID NO: 9699 - DNA, 20 bp, Artificial Sequence
  Synthetic: descartes_5612_SEMA4A
ctgatggatgagcaagtggt

SEQ ID NO: 9700 - DNA, 20 bp, Artificial Sequence
  Synthetic: descartes_5613_SEMA4A
ctcttccaactgcttcagct

SEQ ID NO: 9701 - DNA, 20 bp, Artificial Sequence
  Synthetic: descartes_5614_SEPT1
acacccccttcctcaatctc

SEQ ID NO: 9702 - DNA, 20 bp, Artificial Sequence
  Synthetic: descartes_5615_SEPT1
ctggggcatcagagcatccg

SEQ ID NO: 9703 - DNA, 20 bp, Artificial Sequence
  Synthetic: descartes_5616_SEPT1
ctgaacctgcgacggatgct

SEQ ID NO: 9704 - DNA, 20 bp, Artificial Sequence
  Synthetic: descartes_5617_SEPT1
ggcctgcatcttctccagca

SEQ ID NO: 9705 - DNA, 20 bp, Artificial Sequence
  Synthetic: descartes_5618_SEPT1
ctgccctccccaaccagctg

SEQ ID NO: 9706 - DNA, 20 bp, Artificial Sequence
  Synthetic: descartes_5619_SEPT1
ccgccagagcgccacagaga

SEQ ID NO: 9707 - DNA, 20 bp, Artificial Sequence
  Synthetic: descartes_5620_SEPT1
gggactcagtggactgctct

SEQ ID NO: 9708 - DNA, 20 bp, Artificial Sequence
  Synthetic: descartes_5621_SEPT1
agcagtaccttagggatgag

SEQ ID NO: 9709 - DNA, 20 bp, Artificial Sequence
  Synthetic: descartes_5622_SERPINA1
cccaaactgtccattactgg

SEQ ID NO: 9710 - DNA, 20 bp, Artificial Sequence
  Synthetic: descartes_5623_SERPINA1
aagtcaaggacaccgaggaa

SEQ ID NO: 9711 - DNA, 20 bp, Artificial Sequence
  Synthetic: descartes_5624_SERPINA1
ggcatgtttaacatccagca

SEQ ID NO: 9712 - DNA, 20 bp, Artificial Sequence
  Synthetic: descartes_5625_SERPINA1
acatccagcactgtaagaag

SEQ ID NO: 9713 - DNA, 20 bp, Artificial Sequence
  Synthetic: descartes_5626_SERPINA1
atcagcagcacccagctgga

SEQ ID NO: 9714 - DNA, 20 bp, Artificial Sequence
  Synthetic: descartes_5627_SERPINA1
ccctcatcaggcaggaagaa

SEQ ID NO: 9715 - DNA, 20 bp, Artificial Sequence
  Synthetic: descartes_5628_SERPINA1
caggtgctgtagtttcccct

SEQ ID NO: 9716 - DNA, 20 bp, Artificial Sequence
  Synthetic: descartes_5629_SERPINA1
caggaacttggtgatgatat

SEQ ID NO: 9717 - DNA, 20 bp, Artificial Sequence
  Synthetic: descartes_5630_SERPING1
gtgatcctggtaccccagaa

SEQ ID NO: 9718 - DNA, 20 bp, Artificial Sequence
  Synthetic: descartes_5631_SERPING1
acttcaaaaactcagttata

SEQ ID NO: 9719 - DNA, 20 bp, Artificial Sequence
  Synthetic: descartes_5632_SERPING1
tccctgaagctctaccacgc

SEQ ID NO: 9720 - DNA, 20 bp, Artificial Sequence
  Synthetic: descartes_5633_SERPING1
tccatgatggccttgaaaac

SEQ ID NO: 9721 - DNA, 20 bp, Artificial Sequence
  Synthetic: descartes_5634_SERPING1
aaggccatcatggagaaact

SEQ ID NO: 9722 - DNA, 20 bp, Artificial Sequence
  Synthetic: descartes_5635_SERPING1
aagtgaaagggttccattct

SEQ ID NO: 9723 - DNA, 20 bp, Artificial Sequence
  Synthetic: descartes_5636_SERPING1
cagcttgccgacaaccaact

SEQ ID NO: 9724 - DNA, 20 bp, Artificial Sequence
  Synthetic: descartes_5637_SERPING1
tgcgatgcagcaccagacag

SEQ ID NO: 9725 - DNA, 20 bp, Artificial Sequence
  Synthetic: descartes_5638_SETD1A
gccatctgagtcagcataca

SEQ ID NO: 9726 - DNA, 20 bp, Artificial Sequence
  Synthetic: descartes_5639_SETD1A
ccatggaacccattgctgct

SEQ ID NO: 9727 - DNA, 20 bp, Artificial Sequence
  Synthetic: descartes_5640_SETD1A
gtagttctgatgcaaactac

SEQ ID NO: 9728 - DNA, 20 bp, Artificial Sequence
  Synthetic: descartes_5641_SETD1A
gggagccccggcagctctct

SEQ ID NO: 9729 - DNA, 20 bp, Artificial Sequence
  Synthetic: descartes_5642_SETD1A
gccggagccggatccacgag

SEQ ID NO: 9730 - DNA, 20 bp, Artificial Sequence
  Synthetic: descartes_5643_SETD1A
agcaggtcactgtccatgat

SEQ ID NO: 9731 - DNA, 20 bp, Artificial Sequence
  Synthetic: descartes_5644_SETD1A
ccggcccagcctcccgcaag

SEQ ID NO: 9732 - DNA, 20 bp, Artificial Sequence
  Synthetic: descartes_5645_SETD1A
aacagatgaccatcctgtat

SEQ ID NO: 9733 - DNA, 20 bp, Artificial Sequence
  Synthetic: descartes_5646_SETD2
gtggtaaaaaacccaaccct

SEQ ID NO: 9734 - DNA, 20 bp, Artificial Sequence
  Synthetic: descartes_5647_SETD2
gaagaacacgtaactcaaat

SEQ ID NO: 9735 - DNA, 20 bp, Artificial Sequence
  Synthetic: descartes_5648_SETD2
agaggccctctatctttgat

SEQ ID NO: 9736 - DNA, 20 bp, Artificial Sequence
  Synthetic: descartes_5649_SETD2
ggtgacccagagggtcagat

SEQ ID NO: 9737 - DNA, 20 bp, Artificial Sequence
  Synthetic: descartes_5650_SETD2
gtaggaatgggcaagtgttc

SEQ ID NO: 9738 - DNA, 20 bp, Artificial Sequence
  Synthetic: descartes_5651_SETD2
cctcctgctgctctgatgct

SEQ ID NO: 9739 - DNA, 20 bp, Artificial Sequence
  Synthetic: descartes_5652_SETD2
gctgtgaatgaaaagaaaga

SEQ ID NO: 9740 - DNA, 20 bp, Artificial Sequence
  Synthetic: descartes_5653_SETD2
agagaaaacagcatgcagat

SEQ ID NO: 9741 - DNA, 20 bp, Artificial Sequence
  Synthetic: descartes_5654_SETD3
gtggaacccataaaaacaat

SEQ ID NO: 9742 - DNA, 20 bp, Artificial Sequence
  Synthetic: descartes_5655_SETD3
attagatcaggaaagtaatc

SEQ ID NO: 9743 - DNA, 20 bp, Artificial Sequence
  Synthetic: descartes_5656_SETD3
atggaaaaagagaagattac

SEQ ID NO: 9744 - DNA, 20 bp, Artificial Sequence
  Synthetic: descartes_5657_SETD3
agaggcccatttcattagat

SEQ ID NO: 9745 - DNA, 20 bp, Artificial Sequence
  Synthetic: descartes_5658_SETD3
gtttgagagcaacaagagat

SEQ ID NO: 9746 - DNA, 20 bp, Artificial Sequence
  Synthetic: descartes_5659_SETD3
ccgagccgcccatctctgct

SEQ ID NO: 9747 - DNA, 20 bp, Artificial Sequence
  Synthetic: descartes_5660_SETD3
ggacctggtcccattaggga

SEQ ID NO: 9748 - DNA, 20 bp, Artificial Sequence
  Synthetic: descartes_5661_SETD3
gaaaaagcagtaaagagtgc

SEQ ID NO: 9749 - DNA, 20 bp, Artificial Sequence
  Synthetic: descartes_5662_SETD4
cccaaggcgtatacctgccc

SEQ ID NO: 9750 - DNA, 20 bp, Artificial Sequence
  Synthetic: descartes_5663_SETD4
gacatagcccagaaaatatg

SEQ ID NO: 9751 - DNA, 20 bp, Artificial Sequence
  Synthetic: descartes_5664_SETD4
atagaagagactaatgctgt

SEQ ID NO: 9752 - DNA, 20 bp, Artificial Sequence
  Synthetic: descartes_5665_SETD4
agatacgaatgagaagacaa

SEQ ID NO: 9753 - DNA, 20 bp, Artificial Sequence
  Synthetic: descartes_5666_SETD4
gtggaatccttgtggacgga

SEQ ID NO: 9754 - DNA, 20 bp, Artificial Sequence
  Synthetic: descartes_5667_SETD4
gatgggatggaccatcttgg

SEQ ID NO: 9755 - DNA, 20 bp, Artificial Sequence
  Synthetic: descartes_5668_SETD4
ggaagaaggttcaccacttc

SEQ ID NO: 9756 - DNA, 20 bp, Artificial Sequence
  Synthetic: descartes_5669_SETD4
actcatcagccctcttcctg

SEQ ID NO: 9757 - DNA, 20 bp, Artificial Sequence
  Synthetic: descartes_5670_SETD5
gcagccagccacattctgga

SEQ ID NO: 9758 - DNA, 20 bp, Artificial Sequence
  Synthetic: descartes_5671_SETD5
tcctgaactgtctagacttc

SEQ ID NO: 9759 - DNA, 20 bp, Artificial Sequence
  Synthetic: descartes_5672_SETD5
ccttgtgacaggcacagtcc

SEQ ID NO: 9760 - DNA, 20 bp, Artificial Sequence
  Synthetic: descartes_5673_SETD5
ccagccctcagttgtattct

SEQ ID NO: 9761 - DNA, 20 bp, Artificial Sequence
  Synthetic: descartes_5674_SETD5
tcagtccagcacaggaactc

SEQ ID NO: 9762 - DNA, 20 bp, Artificial Sequence
  Synthetic: descartes_5675_SETD5
ggaaccaataactgtgttat

SEQ ID NO: 9763 - DNA, 20 bp, Artificial Sequence
  Synthetic: descartes_5676_SETD5
gctttggacactcttataat

SEQ ID NO: 9764 - DNA, 20 bp, Artificial Sequence
  Synthetic: descartes_5677_SETD5
gtaactcctactgaagctgg

SEQ ID NO: 9765 - DNA, 20 bp, Artificial Sequence
  Synthetic: descartes_5678_SETD6
gtatgtctgcagcaggcacc

SEQ ID NO: 9766 - DNA, 20 bp, Artificial Sequence
  Synthetic: descartes_5679_SETD6
ctatgcaaactggagatggt

SEQ ID NO: 9767 - DNA, 20 bp, Artificial Sequence
  Synthetic: descartes_5680_SETD6
cccataagtgttgaaaatct

SEQ ID NO: 9768 - DNA, 20 bp, Artificial Sequence
  Synthetic: descartes_5681_SETD6
agtctgtggcataggtctgc

SEQ ID NO: 9769 - DNA, 20 bp, Artificial Sequence
  Synthetic: descartes_5682_SETD6
gcatagacttccttattact

SEQ ID NO: 9770 - DNA, 20 bp, Artificial Sequence
  Synthetic: descartes_5683_SETD6
tcatctccccctccatcctg

SEQ ID NO: 9771 - DNA, 20 bp, Artificial Sequence
  Synthetic: descartes_5684_SETD6
cataggaaatcccagcgctc

SEQ ID NO: 9772 - DNA, 20 bp, Artificial Sequence
  Synthetic: descartes_5685_SETD6
ctcagtaataaggaagtcta

SEQ ID NO: 9773 - DNA, 20 bp, Artificial Sequence
  Synthetic: descartes_5686_SETD7
ccttctatcatctctccatc

SEQ ID NO: 9774 - DNA, 20 bp, Artificial Sequence
  Synthetic: descartes_5687_SETD7
ccataaagtgcggtcctctc

SEQ ID NO: 9775 - DNA, 20 bp, Artificial Sequence
  Synthetic: descartes_5688_SETD7
gagtgaaggagtgatttgcc

SEQ ID NO: 9776 - DNA, 20 bp, Artificial Sequence
  Synthetic: descartes_5689_SETD7
aaaggtagctgtgggaccta

SEQ ID NO: 9777 - DNA, 20 bp, Artificial Sequence
  Synthetic: descartes_5690_SETD7
ggcccatcaaatgcatccgc

SEQ ID NO: 9778 - DNA, 20 bp, Artificial Sequence
  Synthetic: descartes_5691_SETD7
ggagtggagccccaaatctg

SEQ ID NO: 9779 - DNA, 20 bp, Artificial Sequence
  Synthetic: descartes_5692_SETD7
ccttgtgtcccaaggaggca

SEQ ID NO: 9780 - DNA, 20 bp, Artificial Sequence
  Synthetic: descartes_5693_SETD7
gggctccactcccaaagatc

SEQ ID NO: 9781 - DNA, 20 bp, Artificial Sequence
  Synthetic: descartes_5694_SETDB1
gatgcagcaacagctacagt

SEQ ID NO: 9782 - DNA, 20 bp, Artificial Sequence
  Synthetic: descartes_5695_SETDB1
gtgtctcagctacaatgcca

SEQ ID NO: 9783 - DNA, 20 bp, Artificial Sequence
  Synthetic: descartes_5696_SETDB1
ggtccacaagaacatatgga

SEQ ID NO: 9784 - DNA, 20 bp, Artificial Sequence
  Synthetic: descartes_5697_SETDB1
gcgaccacccgactgcccac

SEQ ID NO: 9785 - DNA, 20 bp, Artificial Sequence
  Synthetic: descartes_5698_SETDB1
actgagtgcaggagatgtag

SEQ ID NO: 9786 - DNA, 20 bp, Artificial Sequence
  Synthetic: descartes_5699_SETDB1
atgtctccctcatccttgat

SEQ ID NO: 9787 - DNA, 20 bp, Artificial Sequence
  Synthetic: descartes_5700_SETDB1
attgcaatcccatgggttga

SEQ ID NO: 9788 - DNA, 20 bp, Artificial Sequence
  Synthetic: descartes_5701_SETDB1
gagactggctgtgacttcct

SEQ ID NO: 9789 - DNA, 20 bp, Artificial Sequence
  Synthetic: descartes_5702_SETDB2
cctctacatcatgtgaaaac

SEQ ID NO: 9790 - DNA, 20 bp, Artificial Sequence
  Synthetic: descartes_5703_SETDB2
gttatatctatcacatctga

SEQ ID NO: 9791 - DNA, 20 bp, Artificial Sequence
  Synthetic: descartes_5704_SETDB2
agtgttagctctgcttagta

SEQ ID NO: 9792 - DNA, 20 bp, Artificial Sequence
  Synthetic: descartes_5705_SETDB2
acttagcaactcttcatcac

SEQ ID NO: 9793 - DNA, 20 bp, Artificial Sequence
  Synthetic: descartes_5706_SETDB2
atcagacaagcaccagagca

SEQ ID NO: 9794 - DNA, 20 bp, Artificial Sequence
  Synthetic: descartes_5707_SETDB2
acatgatgtagagggaaatg

SEQ ID NO: 9795 - DNA, 20 bp, Artificial Sequence
  Synthetic: descartes_5708_SETDB2
gtagactccttccacaaggg

SEQ ID NO: 9796 - DNA, 20 bp, Artificial Sequence
  Synthetic: descartes_5709_SETDB2
ctcggagtctgtcactccag

SEQ ID NO: 9797 - DNA, 20 bp, Artificial Sequence
  Synthetic: descartes_5710_SETMAR
cctcatccaccgtattcacc

SEQ ID NO: 9798 - DNA, 20 bp, Artificial Sequence
  Synthetic: descartes_5711_SETMAR
cgctacaggaataaaccaac

SEQ ID NO: 9799 - DNA, 20 bp, Artificial Sequence
  Synthetic: descartes_5712_SETMAR
tacggggcagtacagagaac

SEQ ID NO: 9800 - DNA, 20 bp, Artificial Sequence
  Synthetic: descartes_5713_SETMAR
ctatataagtagggtcaaca

SEQ ID NO: 9801 - DNA, 20 bp, Artificial Sequence
  Synthetic: descartes_5714_SETMAR
cctgcaaaaagttgttgaga

SEQ ID NO: 9802 - DNA, 20 bp, Artificial Sequence
  Synthetic: descartes_5715_SETMAR
gctcacaagaatgattaagg

SEQ ID NO: 9803 - DNA, 20 bp, Artificial Sequence
  Synthetic: descartes_5716_SETMAR
ggattctctgaagttcagag

SEQ ID NO: 9804 - DNA, 20 bp, Artificial Sequence
  Synthetic: descartes_5717_SETMAR
ctgagcatacttctcagatg

SEQ ID NO: 9805 - DNA, 20 bp, Artificial Sequence
  Synthetic: descartes_5718_SFMBT1
acaccagcccaaaggaaata

SEQ ID NO: 9806 - DNA, 20 bp, Artificial Sequence
  Synthetic: descartes_5719_SFMBT1
agggcacaagctaagttact

SEQ ID NO: 9807 - DNA, 20 bp, Artificial Sequence
  Synthetic: descartes_5720_SFMBT1
cagagaatgtatgaatgcca

SEQ ID NO: 9808 - DNA, 20 bp, Artificial Sequence
  Synthetic: descartes_5721_SFMBT1
actatctcaacagtagcccg

SEQ ID NO: 9809 - DNA, 20 bp, Artificial Sequence
  Synthetic: descartes_5722_SFMBT1
ggatctctcctgctacagtt

SEQ ID NO: 9810 - DNA, 20 bp, Artificial Sequence
  Synthetic: descartes_5723_SFMBT1
actgggctgactacctcaaa

SEQ ID NO: 9811 - DNA, 20 bp, Artificial Sequence
  Synthetic: descartes_5724_SFMBT1
ggtgggagaagaggagcatg

SEQ ID NO: 9812 - DNA, 20 bp, Artificial Sequence
  Synthetic: descartes_5725_SFMBT1
aggtagtcagcccagtcaaa

SEQ ID NO: 9813 - DNA, 20 bp, Artificial Sequence
  Synthetic: descartes_5726_SFMBT2
gtatgaatggagcagttctc

SEQ ID NO: 9814 - DNA, 20 bp, Artificial Sequence
  Synthetic: descartes_5727_SFMBT2
agatatcagcacaggactaa

SEQ ID NO: 9815 - DNA, 20 bp, Artificial Sequence
  Synthetic: descartes_5728_SFMBT2
ccagtacagtggtgccttaa

SEQ ID NO: 9816 - DNA, 20 bp, Artificial Sequence
  Synthetic: descartes_5729_SFMBT2
gtcctgtgctgatatctgaa

SEQ ID NO: 9817 - DNA, 20 bp, Artificial Sequence
  Synthetic: descartes_5730_SFMBT2
aatcacactaactatccagt

SEQ ID NO: 9818 - DNA, 20 bp, Artificial Sequence
  Synthetic: descartes_5731_SFMBT2
tgtggtgcagtcaaaggata

SEQ ID NO: 9819 - DNA, 20 bp, Artificial Sequence
  Synthetic: descartes_5732_SFMBT2
gtgcagaagaaacggaggtc

SEQ ID NO: 9820 - DNA, 20 bp, Artificial Sequence
  Synthetic: descartes_5733_SFMBT2
tcaggcccttacctgaacaa

SEQ ID NO: 9821 - DNA, 20 bp, Artificial Sequence
  Synthetic: descartes_5734_SFTPD
ccaggagctgcagggcaagc

SEQ ID NO: 9822 - DNA, 20 bp, Artificial Sequence
  Synthetic: descartes_5735_SFTPD
cagggactccacgctcacca

SEQ ID NO: 9823 - DNA, 20 bp, Artificial Sequence
  Synthetic: descartes_5736_SFTPD
tccacaagccctgtcattcc

SEQ ID NO: 9824 - DNA, 20 bp, Artificial Sequence
  Synthetic: descartes_5737_SFTPD
aagacagcaggctttgtaaa

SEQ ID NO: 9825 - DNA, 20 bp, Artificial Sequence
  Synthetic: descartes_5738_SFTPD
ctgagcatgactgattccaa

SEQ ID NO: 9826 - DNA, 20 bp, Artificial Sequence
  Synthetic: descartes_5739_SFTPD
caaagcctgctgtcttgaaa

SEQ ID NO: 9827 - DNA, 20 bp, Artificial Sequence
  Synthetic: descartes_5740_SFTPD
cggaggcacagctgctgtgc

SEQ ID NO: 9828 - DNA, 20 bp, Artificial Sequence
  Synthetic: descartes_5741_SFTPD
gtccaggttctccaacagag

SEQ ID NO: 9829 - DNA, 20 bp, Artificial Sequence
  Synthetic: descartes_5742_SGF29
aagacacctcctatgcagat

SEQ ID NO: 9830 - DNA, 20 bp, Artificial Sequence
  Synthetic: descartes_5743_SGF29
tccctattaccggacaaagc

SEQ ID NO: 9831 - DNA, 20 bp, Artificial Sequence
  Synthetic: descartes_5744_SGF29
ttgggttccttacaagccac

SEQ ID NO: 9832 - DNA, 20 bp, Artificial Sequence
  Synthetic: descartes_5745_SGF29
ccttcttcatcgatgtcatc

SEQ ID NO: 9833 - DNA, 20 bp, Artificial Sequence
  Synthetic: descartes_5746_SGF29
cgcgatcttgtccagagctt

SEQ ID NO: 9834 - DNA, 20 bp, Artificial Sequence
  Synthetic: descartes_5747_SGF29
atcagctgatggagctctgt

SEQ ID NO: 9835 - DNA, 20 bp, Artificial Sequence
  Synthetic: descartes_5748_SGF29
tttgatcagctgatggagct

SEQ ID NO: 9836 - DNA, 20 bp, Artificial Sequence
  Synthetic: descartes_5749_SH2D1A
ccatgatacacagccactgc

SEQ ID NO: 9837 - DNA, 20 bp, Artificial Sequence
  Synthetic: descartes_5750_SH2D1A
tgtctgggacactcggtatg

SEQ ID NO: 9838 - DNA, 20 bp, Artificial Sequence
  Synthetic: descartes_5751_SH2D1A
tacataccgagtgtcccaga

SEQ ID NO: 9839 - DNA, 20 bp, Artificial Sequence
  Synthetic: descartes_5752_SH2D1A
agaagccagatcaaggcatt

SEQ ID NO: 9840 - DNA, 20 bp, Artificial Sequence
  Synthetic: descartes_5753_SH2D1A
cctgctgattttgccatgat

SEQ ID NO: 9841 - DNA, 20 bp, Artificial Sequence
  Synthetic: descartes_5754_SH2D1A
cggaaaataaaaaatctcat

SEQ ID NO: 9842 - DNA, 20 bp, Artificial Sequence
  Synthetic: descartes_5755_SH2D1A
ctgagggacagcgagagcgt

SEQ ID NO: 9843 - DNA, 20 bp, Artificial Sequence
  Synthetic: descartes_5756_SH2D1A
aggcagacatcaggatcttc

SEQ ID NO: 9844 - DNA, 20 bp, Artificial Sequence
  Synthetic: descartes_5757_SH2D1B
agagacagcgagtcgatacc

SEQ ID NO: 9845 - DNA, 20 bp, Artificial Sequence
  Synthetic: descartes_5758_SH2D1B
aaaggtgaaccaccatcccc

SEQ ID NO: 9846 - DNA, 20 bp, Artificial Sequence
  Synthetic: descartes_5759_SH2D1B
aatcctctccatctcaagct

SEQ ID NO: 9847 - DNA, 20 bp, Artificial Sequence
  Synthetic: descartes_5760_SH2D1B
aaaatattgtctacacatac

SEQ ID NO: 9848 - DNA, 20 bp, Artificial Sequence
  Synthetic: descartes_5761_SH2D1B
aagccaataaagagaaccag

SEQ ID NO: 9849 - DNA, 20 bp, Artificial Sequence
  Synthetic: descartes_5762_SH2D1B
tctctgaagattcggtatgt

SEQ ID NO: 9850 - DNA, 20 bp, Artificial Sequence
  Synthetic: descartes_5763_SH2D1B
gagatcagttcctttaggct

SEQ ID NO: 9851 - DNA, 20 bp, Artificial Sequence
  Synthetic: descartes_5764_SH2D1B
aaatttggagatcagttcct

SEQ ID NO: 9852 - DNA, 20 bp, Artificial Sequence
  Synthetic: descartes_5765_SH2D2A
cctgaggaccgaagaatcaa

SEQ ID NO: 9853 - DNA, 20 bp, Artificial Sequence
  Synthetic: descartes_5766_SH2D2A
gaagcaaaagccaggaccca

SEQ ID NO: 9854 - DNA, 20 bp, Artificial Sequence
  Synthetic: descartes_5767_SH2D2A
ggtcctggcttttgcttcca

SEQ ID NO: 9855 - DNA, 20 bp, Artificial Sequence
  Synthetic: descartes_5768_SH2D2A
tagacaggtgcttcaggaca

SEQ ID NO: 9856 - DNA, 20 bp, Artificial Sequence
  Synthetic: descartes_5769_SH2D2A
gcggggatgggaggcttggg

SEQ ID NO: 9857 - DNA, 20 bp, Artificial Sequence
  Synthetic: descartes_5770_SH2D2A
cttccaaagtttgattcttc

SEQ ID NO: 9858 - DNA, 20 bp, Artificial Sequence
  Synthetic: descartes_5771_SH2D2A
attcttcggtcctcagggaa

SEQ ID NO: 9859 - DNA, 20 bp, Artificial Sequence
  Synthetic: descartes_5772_SH2D2A
atgattgggctgtactgggg

SEQ ID NO: 9860 - DNA, 20 bp, Artificial Sequence
  Synthetic: descartes_5773_SH3RF1
ccatcagatgttccctacca

SEQ ID NO: 9861 - DNA, 20 bp, Artificial Sequence
  Synthetic: descartes_5774_SH3RF1
gtggaggcgccagaaagcaa

SEQ ID NO: 9862 - DNA, 20 bp, Artificial Sequence
  Synthetic: descartes_5775_SH3RF1
ccaggaagctttgtggaaaa

SEQ ID NO: 9863 - DNA, 20 bp, Artificial Sequence
  Synthetic: descartes_5776_SH3RF1
cgaggagtgtatggatatat

SEQ ID NO: 9864 - DNA, 20 bp, Artificial Sequence
  Synthetic: descartes_5777_SH3RF1
gttgctgaactgttcccaca

SEQ ID NO: 9865 - DNA, 20 bp, Artificial Sequence
  Synthetic: descartes_5778_SH3RF1
atgccatccagaagtctgac

SEQ ID NO: 9866 - DNA, 20 bp, Artificial Sequence
  Synthetic: descartes_5779_SH3RF1
ccattacgttgtaatgtgcc

SEQ ID NO: 9867 - DNA, 20 bp, Artificial Sequence
  Synthetic: descartes_5780_SH3RF1
ataggaaggcaagttccctg

SEQ ID NO: 9868 - DNA, 20 bp, Artificial Sequence
  Synthetic: descartes_5781_SHH
gtagagcagctgcgagtacc

SEQ ID NO: 9869 - DNA, 20 bp, Artificial Sequence
  Synthetic: descartes_5782_SHH
actcctggccactggttcat

SEQ ID NO: 9870 - DNA, 20 bp, Artificial Sequence
  Synthetic: descartes_5783_SHH
aggaactcacccccaattac

SEQ ID NO: 9871 - DNA, 20 bp, Artificial Sequence
  Synthetic: descartes_5784_SHH
tggagatcttcccttcatac

SEQ ID NO: 9872 - DNA, 20 bp, Artificial Sequence
  Synthetic: descartes_5785_SHH
gggtgcctcctcttcccgaa

SEQ ID NO: 9873 - DNA, 20 bp, Artificial Sequence
  Synthetic: descartes_5786_SHH
gcctacaagcagtttatccc

SEQ ID NO: 9874 - DNA, 20 bp, Artificial Sequence
  Synthetic: descartes_5787_SHH
tccccaatgtggccgagaag

SEQ ID NO: 9875 - DNA, 20 bp, Artificial Sequence
  Synthetic: descartes_5788_SHH
accgagcagtggatatgtgc

SEQ ID NO: 9876 - DNA, 20 bp, Artificial Sequence
  Synthetic: descartes_5789_SHPRH
ctgtgggacactcaaccatc

SEQ ID NO: 9877 - DNA, 20 bp, Artificial Sequence
  Synthetic: descartes_5790_SHPRH
gcagaacaggatatagttat

SEQ ID NO: 9878 - DNA, 20 bp, Artificial Sequence
  Synthetic: descartes_5791_SHPRH
ccaccacatcctggcagcac

SEQ ID NO: 9879 - DNA, 20 bp, Artificial Sequence
  Synthetic: descartes_5792_SHPRH
gacatagcaacatcagttat

SEQ ID NO: 9880 - DNA, 20 bp, Artificial Sequence
  Synthetic: descartes_5793_SHPRH
gagtggcaagaactctccac

SEQ ID NO: 9881 - DNA, 20 bp, Artificial Sequence
  Synthetic: descartes_5794_SHPRH
agaccctcagatgtaacaat

SEQ ID NO: 9882 - DNA, 20 bp, Artificial Sequence
  Synthetic: descartes_5795_SHPRH
acgagaccttcaaaaattaa

SEQ ID NO: 9883 - DNA, 20 bp, Artificial Sequence
  Synthetic: descartes_5796_SHPRH
ctaggccagcttccaaaaga

SEQ ID NO: 9884 - DNA, 20 bp, Artificial Sequence
  Synthetic: descartes_5797_SIGLEC10
ccagaacccaaatcatccac

SEQ ID NO: 9885 - DNA, 20 bp, Artificial Sequence
  Synthetic: descartes_5798_SIGLEC10
gaaagaacccatcgttcatg

SEQ ID NO: 9886 - DNA, 20 bp, Artificial Sequence
  Synthetic: descartes_5799_SIGLEC10
cttgggaaaccatcactctc

SEQ ID NO: 9887 - DNA, 20 bp, Artificial Sequence
  Synthetic: descartes_5800_SIGLEC10
ggcttccaggtatgggacat

SEQ ID NO: 9888 - DNA, 20 bp, Artificial Sequence
  Synthetic: descartes_5801_SIGLEC10
tcctacccccgacaggactg

SEQ ID NO: 9889 - DNA, 20 bp, Artificial Sequence
  Synthetic: descartes_5802_SIGLEC10
actgggcctttgaggaatgt

SEQ ID NO: 9890 - DNA, 20 bp, Artificial Sequence
  Synthetic: descartes_5803_SIGLEC10
gggtggagagaggaagctat

SEQ ID NO: 9891 - DNA, 20 bp, Artificial Sequence
  Synthetic: descartes_5804_SIGLEC10
tgtctgagtccgtctcttcg

SEQ ID NO: 9892 - DNA, 20 bp, Artificial Sequence
  Synthetic: descartes_5805_SIRT1
tccccagtactagaaccaac

SEQ ID NO: 9893 - DNA, 20 bp, Artificial Sequence
  Synthetic: descartes_5806_SIRT1
atagagccatgaagtatgac

SEQ ID NO: 9894 - DNA, 20 bp, Artificial Sequence
  Synthetic: descartes_5807_SIRT1
gaagaacccatggaggatga

SEQ ID NO: 9895 - DNA, 20 bp, Artificial Sequence
  Synthetic: descartes_5808_SIRT1
gtggcaaaaacagatactga

SEQ ID NO: 9896 - DNA, 20 bp, Artificial Sequence
  Synthetic: descartes_5809_SIRT1
atgatagcaagcggttcatc

SEQ ID NO: 9897 - DNA, 20 bp, Artificial Sequence
  Synthetic: descartes_5810_SIRT1
gaccaagcagctaagagtaa

SEQ ID NO: 9898 - DNA, 20 bp, Artificial Sequence
  Synthetic: descartes_5811_SIRT1
gcatattcaccacctaacct

SEQ ID NO: 9899 - DNA, 20 bp, Artificial Sequence
  Synthetic: descartes_5812_SIRT1
acagatatagcttcattaat

SEQ ID NO: 9900 - DNA, 20 bp, Artificial Sequence
  Synthetic: descartes_5813_SIRT2
gtgagagcctcccagcgcgt

SEQ ID NO: 9901 - DNA, 20 bp, Artificial Sequence
  Synthetic: descartes_5814_SIRT2
gctctccatccaccggcctc

SEQ ID NO: 9902 - DNA, 20 bp, Artificial Sequence
  Synthetic: descartes_5815_SIRT2
tccctctctgttgtcctggc

SEQ ID NO: 9903 - DNA, 20 bp, Artificial Sequence
  Synthetic: descartes_5816_SIRT2
ctggggatgattatgggcct

SEQ ID NO: 9904 - DNA, 20 bp, Artificial Sequence
  Synthetic: descartes_5817_SIRT2
atccagcttagcgggtattc

SEQ ID NO: 9905 - DNA, 20 bp, Artificial Sequence
  Synthetic: descartes_5818_SIRT2
tccttgttgatgagcaggcg

SEQ ID NO: 9906 - DNA, 20 bp, Artificial Sequence
  Synthetic: descartes_5819_SIRT3
cccatggcagatctgctgct

SEQ ID NO: 9907 - DNA, 20 bp, Artificial Sequence
  Synthetic: descartes_5820_SIRT3
cagggtacagctccttggcc

SEQ ID NO: 9908 - DNA, 20 bp, Artificial Sequence
  Synthetic: descartes_5821_SIRT3
cctgcaggatgtagctgagc

SEQ ID NO: 9909 - DNA, 20 bp, Artificial Sequence
  Synthetic: descartes_5822_SIRT3
cctctgccacctgcacagtc

SEQ ID NO: 9910 - DNA, 20 bp, Artificial Sequence
  Synthetic: descartes_5823_SIRT3
gccaaggagctgtaccctgg

SEQ ID NO: 9911 - DNA, 20 bp, Artificial Sequence
  Synthetic: descartes_5824_SIRT3
tgtgggtgcttcaagtgttg

SEQ ID NO: 9912 - DNA, 20 bp, Artificial Sequence
  Synthetic: descartes_5825_SIRT3
actttggccaaggagctgta

SEQ ID NO: 9913 - DNA, 20 bp, Artificial Sequence
  Synthetic: descartes_5826_SIRT3
ccgctgcacaaggtcccgca

SEQ ID NO: 9914 - DNA, 20 bp, Artificial Sequence
  Synthetic: descartes_5827_SIRT4
ggtcaccaaccagtacagct

SEQ ID NO: 9915 - DNA, 20 bp, Artificial Sequence
  Synthetic: descartes_5828_SIRT4
agatggcctccacattgaac

SEQ ID NO: 9916 - DNA, 20 bp, Artificial Sequence
  Synthetic: descartes_5829_SIRT4
tgacctgtagtctggtatcc

SEQ ID NO: 9917 - DNA, 20 bp, Artificial Sequence
  Synthetic: descartes_5830_SIRT4
agacacgccaagtcatccga

SEQ ID NO: 9918 - DNA, 20 bp, Artificial Sequence
  Synthetic: descartes_5831_SIRT4
tcctcactgcctgggagaag

SEQ ID NO: 9919 - DNA, 20 bp, Artificial Sequence
  Synthetic: descartes_5832_SIRT4
aggtcccaacctgcgttcaa

SEQ ID NO: 9920 - DNA, 20 bp, Artificial Sequence
  Synthetic: descartes_5833_SIRT4
tccggagtgccccaatccgc

SEQ ID NO: 9921 - DNA, 20 bp, Artificial Sequence
  Synthetic: descartes_5834_SIRT4
ttcggggacacagtgaaccc

SEQ ID NO: 9922 - DNA, 20 bp, Artificial Sequence
  Synthetic: descartes_5835_SIRT5
acacggagaccaccccagct

SEQ ID NO: 9923 - DNA, 20 bp, Artificial Sequence
  Synthetic: descartes_5836_SIRT5
gagaaaacctggatcctgcc

SEQ ID NO: 9924 - DNA, 20 bp, Artificial Sequence
  Synthetic: descartes_5837_SIRT5
ctgataaagctggacaaatt

SEQ ID NO: 9925 - DNA, 20 bp, Artificial Sequence
  Synthetic: descartes_5838_SIRT5
gtgtggacgctggaggcttc

SEQ ID NO: 9926 - DNA, 20 bp, Artificial Sequence
  Synthetic: descartes_5839_SIRT5
cagggaccctgtggaacgac

SEQ ID NO: 9927 - DNA, 20 bp, Artificial Sequence
  Synthetic: descartes_5840_SIRT5
atgacaggcaagggcttcag

SEQ ID NO: 9928 - DNA, 20 bp, Artificial Sequence
  Synthetic: descartes_5841_SIRT5
tccaataacctccagctcct

SEQ ID NO: 9929 - DNA, 20 bp, Artificial Sequence
  Synthetic: descartes_5842_SIRT5
tccaaaccacacgacgtgag

SEQ ID NO: 9930 - DNA, 20 bp, Artificial Sequence
  Synthetic: descartes_5843_SIRT6
tggaagaatgtgccaagtgt

SEQ ID NO: 9931 - DNA, 20 bp, Artificial Sequence
  Synthetic: descartes_5844_SIRT6
gggctggcgggctctgagcc

SEQ ID NO: 9932 - DNA, 20 bp, Artificial Sequence
  Synthetic: descartes_5845_SIRT6
gggggtctgtggggggcagg

SEQ ID NO: 9933 - DNA, 20 bp, Artificial Sequence
  Synthetic: descartes_5846_SIRT6
agagcgcgcggcccacgcag

SEQ ID NO: 9934 - DNA, 20 bp, Artificial Sequence
  Synthetic: descartes_5847_SIRT7
gcaggggctgcacaaaacgc

SEQ ID NO: 9935 - DNA, 20 bp, Artificial Sequence
  Synthetic: descartes_5848_SIRT7
tgaagcagtgtccacactcc

SEQ ID NO: 9936 - DNA, 20 bp, Artificial Sequence
  Synthetic: descartes_5849_SIRT7
tcactggcgactcccctgcg

SEQ ID NO: 9937 - DNA, 20 bp, Artificial Sequence
  Synthetic: descartes_5850_SIRT7
tgcagcccctgccaaaccag

SEQ ID NO: 9938 - DNA, 20 bp, Artificial Sequence
  Synthetic: descartes_5851_SIRT7
gggagagggggacgttgggg

SEQ ID NO: 9939 - DNA, 20 bp, Artificial Sequence
  Synthetic: descartes_5852_SIRT7
gcgttccggacggcgctggc

SEQ ID NO: 9940 - DNA, 20 bp, Artificial Sequence
  Synthetic: descartes_5853_SIRT7
cgctcggagcggctcagacc

SEQ ID NO: 9941 - DNA, 20 bp, Artificial Sequence
  Synthetic: descartes_5854_SIRT7
aactgggaagcggcgaccga

SEQ ID NO: 9942 - DNA, 20 bp, Artificial Sequence
  Synthetic: descartes_5855_SKAP1
gtcgagtgccactctcatcc

SEQ ID NO: 9943 - DNA, 20 bp, Artificial Sequence
  Synthetic: descartes_5856_SKAP1
tccccacactcccaggcaag

SEQ ID NO: 9944 - DNA, 20 bp, Artificial Sequence
  Synthetic: descartes_5857_SKAP1
ctgaaagccccgtagaatat

SEQ ID NO: 9945 - DNA, 20 bp, Artificial Sequence
  Synthetic: descartes_5858_SKAP1
cagctactagtccagcagaa

SEQ ID NO: 9946 - DNA, 20 bp, Artificial Sequence
  Synthetic: descartes_5859_SKAP1
actccccaagttgtggttcc

SEQ ID NO: 9947 - DNA, 20 bp, Artificial Sequence
  Synthetic: descartes_5860_SKAP1
ttctccaagtatccttgctt

SEQ ID NO: 9948 - DNA, 20 bp, Artificial Sequence
  Synthetic: descartes_5861_SKAP1
ttcttcctcctcatcctctt

SEQ ID NO: 9949 - DNA, 20 bp, Artificial Sequence
  Synthetic: descartes_5862_SKAP1
aactgacctcccaggatagg

SEQ ID NO: 9950 - DNA, 20 bp, Artificial Sequence
  Synthetic: descartes_5863_SLA2
tccctgctcaggccctcata

SEQ ID NO: 9951 - DNA, 20 bp, Artificial Sequence
  Synthetic: descartes_5864_SLA2
ccggcaggtggcccggccga

SEQ ID NO: 9952 - DNA, 20 bp, Artificial Sequence
  Synthetic: descartes_5865_SLA2
cagttgagtggtgtcctctg

SEQ ID NO: 9953 - DNA, 20 bp, Artificial Sequence
  Synthetic: descartes_5866_SLA2
tgaagctgccacaggggagg

SEQ ID NO: 9954 - DNA, 20 bp, Artificial Sequence
  Synthetic: descartes_5867_SLA2
gccacgtggacgctggggat

SEQ ID NO: 9955 - DNA, 20 bp, Artificial Sequence
  Synthetic: descartes_5868_SLAMF1
actccagctgtaagccacat

SEQ ID NO: 9956 - DNA, 20 bp, Artificial Sequence
  Synthetic: descartes_5869_SLAMF1
tctggagaatctcaccctgg

SEQ ID NO: 9957 - DNA, 20 bp, Artificial Sequence
  Synthetic: descartes_5870_SLAMF1
ccgtatccccagggtgagat

SEQ ID NO: 9958 - DNA, 20 bp, Artificial Sequence
  Synthetic: descartes_5871_SLAMF1
tccagggtcataaggtacca

SEQ ID NO: 9959 - DNA, 20 bp, Artificial Sequence
  Synthetic: descartes_5872_SLAMF1
aacaagacccaggagaacgg

SEQ ID NO: 9960 - DNA, 20 bp, Artificial Sequence
  Synthetic: descartes_5873_SLAMF1
actccagtattggttggtag

SEQ ID NO: 9961 - DNA, 20 bp, Artificial Sequence
  Synthetic: descartes_5874_SLAMF1
ccattgtgacgacaatgtgg

SEQ ID NO: 9962 - DNA, 20 bp, Artificial Sequence
  Synthetic: descartes_5875_SLAMF1
atatgtcaggggcagcagca

SEQ ID NO: 9963 - DNA, 20 bp, Artificial Sequence
  Synthetic: descartes_5876_SLAMF6
agtgtctccaacgaacaaca

SEQ ID NO: 9964 - DNA, 20 bp, Artificial Sequence
  Synthetic: descartes_5877_SLAMF6
aatgagtgactgaagcatac

SEQ ID NO: 9965 - DNA, 20 bp, Artificial Sequence
  Synthetic: descartes_5878_SLAMF6
ctgcaggagagaaggtcaac

SEQ ID NO: 9966 - DNA, 20 bp, Artificial Sequence
  Synthetic: descartes_5879_SLAMF6
ccaaggcctcccatctgaat

SEQ ID NO: 9967 - DNA, 20 bp, Artificial Sequence
  Synthetic: descartes_5880_SLAMF6
cagtgaacaggactacacct

SEQ ID NO: 9968 - DNA, 20 bp, Artificial Sequence
  Synthetic: descartes_5881_SLAMF6
atggggtactatgaaggcaa

SEQ ID NO: 9969 - DNA, 20 bp, Artificial Sequence
  Synthetic: descartes_5882_SLAMF6
attgaaaagccaagtgatga

SEQ ID NO: 9970 - DNA, 20 bp, Artificial Sequence
  Synthetic: descartes_5883_SLAMF6
atcatactgctgttacttgt

SEQ ID NO: 9971 - DNA, 20 bp, Artificial Sequence
  Synthetic: descartes_5884_SLAMF7
ccgacaaatgtccactctct

SEQ ID NO: 9972 - DNA, 20 bp, Artificial Sequence
  Synthetic: descartes_5885_SLAMF7
ggtcactatgatagtgcccc

SEQ ID NO: 9973 - DNA, 20 bp, Artificial Sequence
  Synthetic: descartes_5886_SLAMF7
ctccactgtggaaataccga

SEQ ID NO: 9974 - DNA, 20 bp, Artificial Sequence
  Synthetic: descartes_5887_SLAMF7
ggtatttccacagtggagta

SEQ ID NO: 9975 - DNA, 20 bp, Artificial Sequence
  Synthetic: descartes_5888_SLAMF7
cccctgaagtccaaagtaaa

SEQ ID NO: 9976 - DNA, 20 bp, Artificial Sequence
  Synthetic: descartes_5889_SLAMF7
tgctgacagggttcctggca

SEQ ID NO: 9977 - DNA, 20 bp, Artificial Sequence
  Synthetic: descartes_5890_SLAMF7
gtttctgaagagagagagac

SEQ ID NO: 9978 - DNA, 20 bp, Artificial Sequence
  Synthetic: descartes_5891_SLAMF7
ctgagcttcagggagtagcc

SEQ ID NO: 9979 - DNA, 20 bp, Artificial Sequence
  Synthetic: descartes_5892_SLC11A1
ctgggtccaggaaagcaatg

SEQ ID NO: 9980 - DNA, 20 bp, Artificial Sequence
  Synthetic: descartes_5893_SLC11A1
ctggacccaggaaacatcga

SEQ ID NO: 9981 - DNA, 20 bp, Artificial Sequence
  Synthetic: descartes_5894_SLC11A1
tggtagaaggcctgcccaaa

SEQ ID NO: 9982 - DNA, 20 bp, Artificial Sequence
  Synthetic: descartes_5895_SLC11A1
gactccttataaccattatg

SEQ ID NO: 9983 - DNA, 20 bp, Artificial Sequence
  Synthetic: descartes_5896_SLC11A1
ggcaggccttctaccagaaa

SEQ ID NO: 9984 - DNA, 20 bp, Artificial Sequence
  Synthetic: descartes_5897_SLC11A1
tggcccacagctcccaccac

SEQ ID NO: 9985 - DNA, 20 bp, Artificial Sequence
  Synthetic: descartes_5898_SLC11A1
tgtctgggatggggatcttc

SEQ ID NO: 9986 - DNA, 20 bp, Artificial Sequence
  Synthetic: descartes_5899_SLC11A1
tggtcctcttcaaggagccc

SEQ ID NO: 9987 - DNA, 20 bp, Artificial Sequence
  Synthetic: descartes_5900_SLC12A2
ggagcactcactagggatgc

SEQ ID NO: 9988 - DNA, 20 bp, Artificial Sequence
  Synthetic: descartes_5901_SLC12A2
tatacatatccacatccctc

SEQ ID NO: 9989 - DNA, 20 bp, Artificial Sequence
  Synthetic: descartes_5902_SLC12A2
ccataacctttagcaaacat

SEQ ID NO: 9990 - DNA, 20 bp, Artificial Sequence
  Synthetic: descartes_5903_SLC12A2
ggcgaataaccactactcca

SEQ ID NO: 9991 - DNA, 20 bp, Artificial Sequence
  Synthetic: descartes_5904_SLC12A2
ctatattccacacttactac

SEQ ID NO: 9992 - DNA, 20 bp, Artificial Sequence
  Synthetic: descartes_5905_SLC12A2
ggtatctcagtagctggaat

SEQ ID NO: 9993 - DNA, 20 bp, Artificial Sequence
  Synthetic: descartes_5906_SLC12A2
aatgtagctgaccaaaagct

SEQ ID NO: 9994 - DNA, 20 bp, Artificial Sequence
  Synthetic: descartes_5907_SLC12A2
gatacttccaaaccactcag

SEQ ID NO: 9995 - DNA, 20 bp, Artificial Sequence
  Synthetic: descartes_5908_SLC39A3
agaaggcccatcgctcgaaa

SEQ ID NO: 9996 - DNA, 20 bp, Artificial Sequence
  Synthetic: descartes_5909_SLC39A3
gagcgatgggccttctcaaa

SEQ ID NO: 9997 - DNA, 20 bp, Artificial Sequence
  Synthetic: descartes_5910_SLC39A3
cctcacagcgggcagcagag

SEQ ID NO: 9998 - DNA, 20 bp, Artificial Sequence
  Synthetic: descartes_5911_SLC39A3
aacactgatgccaagttcag

SEQ ID NO: 9999 - DNA, 20 bp, Artificial Sequence
  Synthetic: descartes_5912_SLC39A3
tggccacgtgcttcaacgct

SEQ ID NO: 10000 - DNA, 20 bp, Artificial Sequence
  Synthetic: descartes_5913_SLC39A3
tccccctcctcctgcaggcc

SEQ ID NO: 10001 - DNA, 20 bp, Artificial Sequence
  Synthetic: descartes_5914_SLC39A3
ggccagcgggtagtcggtgc

SEQ ID NO: 10002 - DNA, 20 bp, Artificial Sequence
  Synthetic: descartes_5915_SLC39A3
gaggaggggtgtttctggcc

SEQ ID NO: 10003 - DNA, 20 bp, Artificial Sequence
  Synthetic: descartes_5916_SMAD1
actgatccttccaacaataa

SEQ ID NO: 10004 - DNA, 20 bp, Artificial Sequence
  Synthetic: descartes_5917_SMAD1
agactacacccactagggat

SEQ ID NO: 10005 - DNA, 20 bp, Artificial Sequence
  Synthetic: descartes_5918_SMAD1
gtgaaaaaactgaagaaaaa

SEQ ID NO: 10006 - DNA, 20 bp, Artificial Sequence
  Synthetic: descartes_5919_SMAD1
cacccaagaagtctcttcac

SEQ ID NO: 10007 - DNA, 20 bp, Artificial Sequence
  Synthetic: descartes_5920_SMAD1
gttccaagcagaaggaggtc

SEQ ID NO: 10008 - DNA, 20 bp, Artificial Sequence
  Synthetic: descartes_5921_SMAD1
agacagtctatgagcttaca

SEQ ID NO: 10009 - DNA, 20 bp, Artificial Sequence
  Synthetic: descartes_5922_SMAD1
accaaagcatcaacagcttt

SEQ ID NO: 10010 - DNA, 20 bp, Artificial Sequence
  Synthetic: descartes_5923_SMAD1
ctcactctcccaatagcagt

SEQ ID NO: 10011 - DNA, 20 bp, Artificial Sequence
  Synthetic: descartes_5924_SMAD7
agcggaggaaggcacagcat

SEQ ID NO: 10012 - DNA, 20 bp, Artificial Sequence
  Synthetic: descartes_5925_SMAD7
cctcggacagctcaattcgg

SEQ ID NO: 10013 - DNA, 20 bp, Artificial Sequence
  Synthetic: descartes_5926_SMAD7
agaaaatccatcgggtatct

SEQ ID NO: 10014 - DNA, 20 bp, Artificial Sequence
  Synthetic: descartes_5927_SMAD7
ccgtgcagatcagctttgtg

SEQ ID NO: 10015 - DNA, 20 bp, Artificial Sequence
  Synthetic: descartes_5928_SMAD7
ttgagcaccgagtgcgtgag

SEQ ID NO: 10016 - DNA, 20 bp, Artificial Sequence
  Synthetic: descartes_5929_SMAD7
tccatcaaggctttcgacta

SEQ ID NO: 10017 - DNA, 20 bp, Artificial Sequence
  Synthetic: descartes_5930_SMAD7
gactacgagaaggcgtacag

SEQ ID NO: 10018 - DNA, 20 bp, Artificial Sequence
  Synthetic: descartes_5931_SMAD7
ctccgcaccttctgcaccag

SEQ ID NO: 10019 - DNA, 20 bp, Artificial Sequence
  Synthetic: descartes_5932_SMARCA2
cctgtataataacaacttga

SEQ ID NO: 10020 - DNA, 20 bp, Artificial Sequence
  Synthetic: descartes_5933_SMARCA2
ctaaggagactgaagaaaga

SEQ ID NO: 10021 - DNA, 20 bp, Artificial Sequence
  Synthetic: descartes_5934_SMARCA2
atggaggaggatgagctgcc

SEQ ID NO: 10022 - DNA, 20 bp, Artificial Sequence
  Synthetic: descartes_5935_SMARCA2
gaggaaatggaagaggaagt

SEQ ID NO: 10023 - DNA, 20 bp, Artificial Sequence
  Synthetic: descartes_5936_SMARCA2
gcagaatacgatcaagcagc

SEQ ID NO: 10024 - DNA, 20 bp, Artificial Sequence
  Synthetic: descartes_5937_SMARCA2
agagctgcagcacatttgaa

SEQ ID NO: 10025 - DNA, 20 bp, Artificial Sequence
  Synthetic: descartes_5938_SMARCA2
tgagaaggatgctaagcaga

SEQ ID NO: 10026 - DNA, 20 bp, Artificial Sequence
  Synthetic: descartes_5939_SMARCA2
agcccaggccaccagctctt

SEQ ID NO: 10027 - DNA, 20 bp, Artificial Sequence
  Synthetic: descartes_5940_SMARCA4
cctgtgacggatctgtgata

SEQ ID NO: 10028 - DNA, 20 bp, Artificial Sequence
  Synthetic: descartes_5941_SMARCA4
aaggaatatcacagatccgt

SEQ ID NO: 10029 - DNA, 20 bp, Artificial Sequence
  Synthetic: descartes_5942_SMARCA4
accagaaccagctgcaccag

SEQ ID NO: 10030 - DNA, 20 bp, Artificial Sequence
  Synthetic: descartes_5943_SMARCA4
cccgaggctcggtacaggtc

SEQ ID NO: 10031 - DNA, 20 bp, Artificial Sequence
  Synthetic: descartes_5944_SMARCA4
gagtggctggtgtccctgta

SEQ ID NO: 10032 - DNA, 20 bp, Artificial Sequence
  Synthetic: descartes_5945_SMARCA4
acagcgactggaatcctcac

SEQ ID NO: 10033 - DNA, 20 bp, Artificial Sequence
  Synthetic: descartes_5946_SMARCA4
gcagaacagcagcactttgt

SEQ ID NO: 10034 - DNA, 20 bp, Artificial Sequence
  Synthetic: descartes_5947_SMARCA4
ggaagaattctatcaagaag

SEQ ID NO: 10035 - DNA, 20 bp, Artificial Sequence
  Synthetic: descartes_5948_SMARCC1
gtatcctcactcacttcact

SEQ ID NO: 10036 - DNA, 20 bp, Artificial Sequence
  Synthetic: descartes_5949_SMARCC1
gacgatacgtgtcaatcata

SEQ ID NO: 10037 - DNA, 20 bp, Artificial Sequence
  Synthetic: descartes_5950_SMARCC1
accagacccaacatctacct

SEQ ID NO: 10038 - DNA, 20 bp, Artificial Sequence
  Synthetic: descartes_5951_SMARCC1
ctgagaaaaacaaggaaaaa

SEQ ID NO: 10039 - DNA, 20 bp, Artificial Sequence
  Synthetic: descartes_5952_SMARCC1
ggaagtactacttcttctat

SEQ ID NO: 10040 - DNA, 20 bp, Artificial Sequence
  Synthetic: descartes_5953_SMARCC1
gtgaaggccgggttggtgac

SEQ ID NO: 10041 - DNA, 20 bp, Artificial Sequence
  Synthetic: descartes_5954_SMARCC1
ggagagcccggagacggtgt

SEQ ID NO: 10042 - DNA, 20 bp, Artificial Sequence
  Synthetic: descartes_5955_SMARCC1
cattgaagaactcaggaaga

SEQ ID NO: 10043 - DNA, 20 bp, Artificial Sequence
  Synthetic: descartes_5956_SMARCC2
gtagtctagctgactccatc

SEQ ID NO: 10044 - DNA, 20 bp, Artificial Sequence
  Synthetic: descartes_5957_SMARCC2
gtgagcggtgcattgctgac

SEQ ID NO: 10045 - DNA, 20 bp, Artificial Sequence
  Synthetic: descartes_5958_SMARCC2
ggaagtgtcacctcttctac

SEQ ID NO: 10046 - DNA, 20 bp, Artificial Sequence
  Synthetic: descartes_5959_SMARCC2
tcaggagttggagcatcttc

SEQ ID NO: 10047 - DNA, 20 bp, Artificial Sequence
  Synthetic: descartes_5960_SMARCC2
gcatgccgcctcctcctcct

SEQ ID NO: 10048 - DNA, 20 bp, Artificial Sequence
  Synthetic: descartes_5961_SMARCC2
actggggccgactctgagtc

SEQ ID NO: 10049 - DNA, 20 bp, Artificial Sequence
  Synthetic: descartes_5962_SMARCC2
cctagtagtttgggctcaat

SEQ ID NO: 10050 - DNA, 20 bp, Artificial Sequence
  Synthetic: descartes_5963_SMARCC2
cttcatagtcttcctcattc

SEQ ID NO: 10051 - DNA, 20 bp, Artificial Sequence
  Synthetic: descartes_5964_SMN1
ggatgatacagcactgataa

SEQ ID NO: 10052 - DNA, 20 bp, Artificial Sequence
  Synthetic: descartes_5965_SMN1
cccgaagtttcacaaatgtc

SEQ ID NO: 10053 - DNA, 20 bp, Artificial Sequence
  Synthetic: descartes_5966_SMN1
cccagctaccattgcttcaa

SEQ ID NO: 10054 - DNA, 20 bp, Artificial Sequence
  Synthetic: descartes_5967_SMN1
agagagaaacctgtgttgtg

SEQ ID NO: 10055 - DNA, 20 bp, Artificial Sequence
  Synthetic: descartes_5968_SMN1
catatccagtgtaaaccaca

SEQ ID NO: 10056 - DNA, 20 bp, Artificial Sequence
  Synthetic: descartes_5969_SMN1
gtttacccgaagtttcacaa

SEQ ID NO: 10057 - DNA, 20 bp, Artificial Sequence
  Synthetic: descartes_5970_SMN1
cactggatatggaaatagag

SEQ ID NO: 10058 - DNA, 20 bp, Artificial Sequence
  Synthetic: descartes_5971_SMN1
gtcagaagacggttgcattt

SEQ ID NO: 10059 - DNA, 20 bp, Artificial Sequence
  Synthetic: descartes_5972_SMNDC1
gaataggctctgttgttgaa

SEQ ID NO: 10060 - DNA, 20 bp, Artificial Sequence
  Synthetic: descartes_5973_SMNDC1
gaggtatcttgatattgtgt

SEQ ID NO: 10061 - DNA, 20 bp, Artificial Sequence
  Synthetic: descartes_5974_SMNDC1
gcaaagcagctggcaagcta

SEQ ID NO: 10062 - DNA, 20 bp, Artificial Sequence
  Synthetic: descartes_5975_SMNDC1
ccagtcacactctcaggtga

SEQ ID NO: 10063 - DNA, 20 bp, Artificial Sequence
  Synthetic: descartes_5976_SMNDC1
tcagcaattccacaggttcc

SEQ ID NO: 10064 - DNA, 20 bp, Artificial Sequence
  Synthetic: descartes_5977_SMNDC1
cttctactcaacctactcat

SEQ ID NO: 10065 - DNA, 20 bp, Artificial Sequence
  Synthetic: descartes_5978_SMNDC1
cagataatgcagcttcaact

SEQ ID NO: 10066 - DNA, 20 bp, Artificial Sequence
  Synthetic: descartes_5979_SMNDC1
catgaatgagtaggttgagt

SEQ ID NO: 10067 - DNA, 20 bp, Artificial Sequence
  Synthetic: descartes_5980_SMO
tgtcacccctgtggcaactc

SEQ ID NO: 10068 - DNA, 20 bp, Artificial Sequence
  Synthetic: descartes_5981_SMO
gtttgtggtcctcacctatg

SEQ ID NO: 10069 - DNA, 20 bp, Artificial Sequence
  Synthetic: descartes_5982_SMO
tgggctacaagaactaccga

SEQ ID NO: 10070 - DNA, 20 bp, Artificial Sequence
  Synthetic: descartes_5983_SMO
gctcatcgtcactctgccca

SEQ ID NO: 10071 - DNA, 20 bp, Artificial Sequence
  Synthetic: descartes_5984_SMO
gaactggcatcgccatgagc

SEQ ID NO: 10072 - DNA, 20 bp, Artificial Sequence
  Synthetic: descartes_5985_SMO
gcttcctggcctttggcttt

SEQ ID NO: 10073 - DNA, 20 bp, Artificial Sequence
  Synthetic: descartes_5986_SMO
aaggaagtgtgccaggcata

SEQ ID NO: 10074 - DNA, 20 bp, Artificial Sequence
  Synthetic: descartes_5987_SMO
tggtcctcacctatgcctgg

SEQ ID NO: 10075 - DNA, 20 bp, Artificial Sequence
  Synthetic: descartes_5988_SMYD1
ggaggtcctttcctacctcc

SEQ ID NO: 10076 - DNA, 20 bp, Artificial Sequence
  Synthetic: descartes_5989_SMYD1
tgtgccacacctgcttcaag

SEQ ID NO: 10077 - DNA, 20 bp, Artificial Sequence
  Synthetic: descartes_5990_SMYD1
ctgacaccaacatctacatg

SEQ ID NO: 10078 - DNA, 20 bp, Artificial Sequence
  Synthetic: descartes_5991_SMYD1
actgcacatgtgaacactgc

SEQ ID NO: 10079 - DNA, 20 bp, Artificial Sequence
  Synthetic: descartes_5992_SMYD1
cccattactgcgaccgcacc

SEQ ID NO: 10080 - DNA, 20 bp, Artificial Sequence
  Synthetic: descartes_5993_SMYD1
caatgtatccttggagaatt

SEQ ID NO: 10081 - DNA, 20 bp, Artificial Sequence
  Synthetic: descartes_5994_SMYD1
ccctcagcggtgaagacctc

SEQ ID NO: 10082 - DNA, 20 bp, Artificial Sequence
  Synthetic: descartes_5995_SMYD1
ctctcagtgatcagagaggc

SEQ ID NO: 10083 - DNA, 20 bp, Artificial Sequence
  Synthetic: descartes_5996_SMYD2
cccaaaaacaaccatgggag

SEQ ID NO: 10084 - DNA, 20 bp, Artificial Sequence
  Synthetic: descartes_5997_SMYD2
cctgtgagtgccaggagtgt

SEQ ID NO: 10085 - DNA, 20 bp, Artificial Sequence
  Synthetic: descartes_5998_SMYD2
ctccaagcatctcggattcc

SEQ ID NO: 10086 - DNA, 20 bp, Artificial Sequence
  Synthetic: descartes_5999_SMYD2
gccagaatccttgctgttag

SEQ ID NO: 10087 - DNA, 20 bp, Artificial Sequence
  Synthetic: descartes_6000_SMYD2
ccgtgagctacttccatgat

SEQ ID NO: 10088 - DNA, 20 bp, Artificial Sequence
  Synthetic: descartes_6001_SMYD2
ctgtacagctctgacttctg

SEQ ID NO: 10089 - DNA, 20 bp, Artificial Sequence
  Synthetic: descartes_6002_SMYD2
ctgtttgatctcagaaatat

SEQ ID NO: 10090 - DNA, 20 bp, Artificial Sequence
  Synthetic: descartes_6003_SMYD2
atctcagaaatatatggatg

SEQ ID NO: 10091 - DNA, 20 bp, Artificial Sequence
  Synthetic: descartes_6004_SMYD3
ccaggaagccatcccgtcag

SEQ ID NO: 10092 - DNA, 20 bp, Artificial Sequence
  Synthetic: descartes_6005_SMYD3
atgagagaagaaatacagga

SEQ ID NO: 10093 - DNA, 20 bp, Artificial Sequence
  Synthetic: descartes_6006_SMYD3
gaagaatgcgacgccaacat

SEQ ID NO: 10094 - DNA, 20 bp, Artificial Sequence
  Synthetic: descartes_6007_SMYD3
cccaagcaatgaagaatctg

SEQ ID NO: 10095 - DNA, 20 bp, Artificial Sequence
  Synthetic: descartes_6008_SMYD3
aagacaactctgccaagaag

SEQ ID NO: 10096 - DNA, 20 bp, Artificial Sequence
  Synthetic: descartes_6009_SMYD3
gcaacggaaacagtcacatt

SEQ ID NO: 10097 - DNA, 20 bp, Artificial Sequence
  Synthetic: descartes_6010_SMYD3
ccctcttggcggttgcgaac

SEQ ID NO: 10098 - DNA, 20 bp, Artificial Sequence
  Synthetic: descartes_6011_SMYD3
ttctctcatgaaatgttgaa

SEQ ID NO: 10099 - DNA, 20 bp, Artificial Sequence
  Synthetic: descartes_6012_SMYD4
cctgaaagcaacaatcaggt

SEQ ID NO: 10100 - DNA, 20 bp, Artificial Sequence
  Synthetic: descartes_6013_SMYD4
gccagagctgctgggaagct

SEQ ID NO: 10101 - DNA, 20 bp, Artificial Sequence
  Synthetic: descartes_6014_SMYD4
tacagagaagaaggaaacaa

SEQ ID NO: 10102 - DNA, 20 bp, Artificial Sequence
  Synthetic: descartes_6015_SMYD4
agtgtggggcaaaaggttga

SEQ ID NO: 10103 - DNA, 20 bp, Artificial Sequence
  Synthetic: descartes_6016_SMYD4
aggtaaacagatgtccttgt

SEQ ID NO: 10104 - DNA, 20 bp, Artificial Sequence
  Synthetic: descartes_6017_SMYD4
caggccatcccaactgagag

SEQ ID NO: 10105 - DNA, 20 bp, Artificial Sequence
  Synthetic: descartes_6018_SMYD4
atacttcccattaatatcgc

SEQ ID NO: 10106 - DNA, 20 bp, Artificial Sequence
  Synthetic: descartes_6019_SMYD4
cattcatccacaggcagatc

SEQ ID NO: 10107 - DNA, 20 bp, Artificial Sequence
  Synthetic: descartes_6020_SMYD5
ggacaggaacagacaaatag

SEQ ID NO: 10108 - DNA, 20 bp, Artificial Sequence
  Synthetic: descartes_6021_SMYD5
ccggtcagcctctgggcatt

SEQ ID NO: 10109 - DNA, 20 bp, Artificial Sequence
  Synthetic: descartes_6022_SMYD5
tctggaatgcactttatcgc

SEQ ID NO: 10110 - DNA, 20 bp, Artificial Sequence
  Synthetic: descartes_6023_SMYD5
catgtcactgctctggagga

SEQ ID NO: 10111 - DNA, 20 bp, Artificial Sequence
  Synthetic: descartes_6024_SMYD5
tggaaaggaggtctctgcat

SEQ ID NO: 10112 - DNA, 20 bp, Artificial Sequence
  Synthetic: descartes_6025_SMYD5
tctgttcctgtcccaaatgc

SEQ ID NO: 10113 - DNA, 20 bp, Artificial Sequence
  Synthetic: descartes_6026_SMYD5
tatcagctacttggactgct

SEQ ID NO: 10114 - DNA, 20 bp, Artificial Sequence
  Synthetic: descartes_6027_SMYD5
taacaaaacagccaatgaag

SEQ ID NO: 10115 - DNA, 20 bp, Artificial Sequence
  Synthetic: descartes_6028_SND1
agacgagaaccactgaagac

SEQ ID NO: 10116 - DNA, 20 bp, Artificial Sequence
  Synthetic: descartes_6029_SND1
gcaggagactcgactttctc

SEQ ID NO: 10117 - DNA, 20 bp, Artificial Sequence
  Synthetic: descartes_6030_SND1
acgatagaaaacaagactcc

SEQ ID NO: 10118 - DNA, 20 bp, Artificial Sequence
  Synthetic: descartes_6031_SND1
actgagtcgcgactgcttca

SEQ ID NO: 10119 - DNA, 20 bp, Artificial Sequence
  Synthetic: descartes_6032_SND1
aatggtatacttgagatccc

SEQ ID NO: 10120 - DNA, 20 bp, Artificial Sequence
  Synthetic: descartes_6033_SND1
gaaggaactctcgagctgga

SEQ ID NO: 10121 - DNA, 20 bp, Artificial Sequence
  Synthetic: descartes_6034_SND1
actgccatctgcttcccgtc

SEQ ID NO: 10122 - DNA, 20 bp, Artificial Sequence
  Synthetic: descartes_6035_SND1
gacgggaagcagatggcagt

SEQ ID NO: 10123 - DNA, 20 bp, Artificial Sequence
  Synthetic: descartes_6036_SOCS5
ccatgagaacttacagcaag

SEQ ID NO: 10124 - DNA, 20 bp, Artificial Sequence
  Synthetic: descartes_6037_SOCS5
actacggcttcctccctcat

SEQ ID NO: 10125 - DNA, 20 bp, Artificial Sequence
  Synthetic: descartes_6038_SOCS5
gtagaactcgaagtggactt

SEQ ID NO: 10126 - DNA, 20 bp, Artificial Sequence
  Synthetic: descartes_6039_SOCS5
aaagagtatcattataaaca

SEQ ID NO: 10127 - DNA, 20 bp, Artificial Sequence
  Synthetic: descartes_6040_SOCS5
gtgatatagtaagcaatggt

SEQ ID NO: 10128 - DNA, 20 bp, Artificial Sequence
  Synthetic: descartes_6041_SOCS5
ccttcgagaagggcttctgc

SEQ ID NO: 10129 - DNA, 20 bp, Artificial Sequence
  Synthetic: descartes_6042_SOCS5
gcctgcagtatatctgtcgc

SEQ ID NO: 10130 - DNA, 20 bp, Artificial Sequence
  Synthetic: descartes_6043_SOCS5
gtcccagtttatataatgga

SEQ ID NO: 10131 - DNA, 20 bp, Artificial Sequence
  Synthetic: descartes_6044_SOS1
cctcccaaccatcaatattc

SEQ ID NO: 10132 - DNA, 20 bp, Artificial Sequence
  Synthetic: descartes_6045_SOS1
gaagaagctcatgaattgag

SEQ ID NO: 10133 - DNA, 20 bp, Artificial Sequence
  Synthetic: descartes_6046_SOS1
gaagaaagagtagctgtggt

SEQ ID NO: 10134 - DNA, 20 bp, Artificial Sequence
  Synthetic: descartes_6047_SOS1
gtcgcatagtagatatacat

SEQ ID NO: 10135 - DNA, 20 bp, Artificial Sequence
  Synthetic: descartes_6048_SOS1
aaagaagctgttcaatatgt

SEQ ID NO: 10136 - DNA, 20 bp, Artificial Sequence
  Synthetic: descartes_6049_SOS1
atggacgaacaccaggagat

SEQ ID NO: 10137 - DNA, 20 bp, Artificial Sequence
  Synthetic: descartes_6050_SOS1
catagtagcagtcttagaat

SEQ ID NO: 10138 - DNA, 20 bp, Artificial Sequence
  Synthetic: descartes_6051_SOS1
cataccactctgaacattaa

SEQ ID NO: 10139 - DNA, 20 bp, Artificial Sequence
  Synthetic: descartes_6052_SP100
gaatcacagtagaccttcaa

SEQ ID NO: 10140 - DNA, 20 bp, Artificial Sequence
  Synthetic: descartes_6053_SP100
tatccaccagtcgcacagaa

SEQ ID NO: 10141 - DNA, 20 bp, Artificial Sequence
  Synthetic: descartes_6054_SP100
tgccagaaccaccaagcaca

SEQ ID NO: 10142 - DNA, 20 bp, Artificial Sequence
  Synthetic: descartes_6055_SP100
acaggggtgctctgagagtc

SEQ ID NO: 10143 - DNA, 20 bp, Artificial Sequence
  Synthetic: descartes_6056_SP100
actctgaataacaaagtcca

SEQ ID NO: 10144 - DNA, 20 bp, Artificial Sequence
  Synthetic: descartes_6057_SP100
ggcgatactcagagcagaac

SEQ ID NO: 10145 - DNA, 20 bp, Artificial Sequence
  Synthetic: descartes_6058_SP100
gctcgatatgcagcaatatc

SEQ ID NO: 10146 - DNA, 20 bp, Artificial Sequence
  Synthetic: descartes_6059_SP100
tcctcactctgtatacactt

SEQ ID NO: 10147 - DNA, 20 bp, Artificial Sequence
  Synthetic: descartes_6060_SP110
actgaacaatgtcaccagaa

SEQ ID NO: 10148 - DNA, 20 bp, Artificial Sequence
  Synthetic: descartes_6061_SP110
gagttgaccagatacatctt

SEQ ID NO: 10149 - DNA, 20 bp, Artificial Sequence
  Synthetic: descartes_6062_SP110
gtgttaaccaagttccatcc

SEQ ID NO: 10150 - DNA, 20 bp, Artificial Sequence
  Synthetic: descartes_6063_SP110
gttctggagaattatctctt

SEQ ID NO: 10151 - DNA, 20 bp, Artificial Sequence
  Synthetic: descartes_6064_SP110
ctctgtcctccaagaataaa

SEQ ID NO: 10152 - DNA, 20 bp, Artificial Sequence
  Synthetic: descartes_6065_SP110
atgaagccaatgacggcggt

SEQ ID NO: 10153 - DNA, 20 bp, Artificial Sequence
  Synthetic: descartes_6066_SP110
aaggcctcctagacaactcc

SEQ ID NO: 10154 - DNA, 20 bp, Artificial Sequence
  Synthetic: descartes_6067_SP110
acctgtctcttctggtgaca

SEQ ID NO: 10155 - DNA, 20 bp, Artificial Sequence
  Synthetic: descartes_6068_SP140
gaagatagacccagattact

SEQ ID NO: 10156 - DNA, 20 bp, Artificial Sequence
  Synthetic: descartes_6069_SP140
catcctcagtctgtatacac

SEQ ID NO: 10157 - DNA, 20 bp, Artificial Sequence
  Synthetic: descartes_6070_SP140
actggagaccacctggccgt

SEQ ID NO: 10158 - DNA, 20 bp, Artificial Sequence
  Synthetic: descartes_6071_SP140
gctggtcacatctggaagca

SEQ ID NO: 10159 - DNA, 20 bp, Artificial Sequence
  Synthetic: descartes_6072_SP140
ctgaatagcaaacacttcct

SEQ ID NO: 10160 - DNA, 20 bp, Artificial Sequence
  Synthetic: descartes_6073_SP140
gagaggtgagtgttcatagc

SEQ ID NO: 10161 - DNA, 20 bp, Artificial Sequence
  Synthetic: descartes_6074_SP140
gactggaggctgagtttgag

SEQ ID NO: 10162 - DNA, 20 bp, Artificial Sequence
  Synthetic: descartes_6075_SP140
tgtgcagctctgtcactctg

SEQ ID NO: 10163 - DNA, 20 bp, Artificial Sequence
  Synthetic: descartes_6076_SP140L
tgtggagctctgtcactctg

SEQ ID NO: 10164 - DNA, 20 bp, Artificial Sequence
  Synthetic: descartes_6077_SP140L
ctgaatagcaaacacttcct

SEQ ID NO: 10165 - DNA, 20 bp, Artificial Sequence
  Synthetic: descartes_6078_SP140L
actcgagaccagctggccat

SEQ ID NO: 10166 - DNA, 20 bp, Artificial Sequence
  Synthetic: descartes_6079_SP140L
atgtcaggcctctcttccct

SEQ ID NO: 10167 - DNA, 20 bp, Artificial Sequence
  Synthetic: descartes_6080_SP140L
catcctcagtctgtatacac

SEQ ID NO: 10168 - DNA, 20 bp, Artificial Sequence
  Synthetic: descartes_6081_SP140L
ccaagattccatactattat

SEQ ID NO: 10169 - DNA, 20 bp, Artificial Sequence
  Synthetic: descartes_6082_SP140L
gctgtgtgcaggaagatggt

SEQ ID NO: 10170 - DNA, 20 bp, Artificial Sequence
  Synthetic: descartes_6083_SP140L
atatctccagcttatgtctt

SEQ ID NO: 10171 - DNA, 20 bp, Artificial Sequence
  Synthetic: descartes_6084_SPN
cctgagccaacaacctacca

SEQ ID NO: 10172 - DNA, 20 bp, Artificial Sequence
  Synthetic: descartes_6085_SPN
ctggggcactgatgacatct

SEQ ID NO: 10173 - DNA, 20 bp, Artificial Sequence
  Synthetic: descartes_6086_SPN
ctgttatgggaacagcagga

SEQ ID NO: 10174 - DNA, 20 bp, Artificial Sequence
  Synthetic: descartes_6087_SPN
gaagtctccagagagacagt

SEQ ID NO: 10175 - DNA, 20 bp, Artificial Sequence
  Synthetic: descartes_6088_SPN
cgctagagacctggggtcca

SEQ ID NO: 10176 - DNA, 20 bp, Artificial Sequence
  Synthetic: descartes_6089_SPN
catcaagatgtcatcagtgc

SEQ ID NO: 10177 - DNA, 20 bp, Artificial Sequence
  Synthetic: descartes_6090_SPN
tggagagttcgttgttatgg

SEQ ID NO: 10178 - DNA, 20 bp, Artificial Sequence
  Synthetic: descartes_6091_SPN
gtctctactagcgagcccct

SEQ ID NO: 10179 - DNA, 20 bp, Artificial Sequence
  Synthetic: descartes_6092_SPP1
ccacggacctgccagcaacc

SEQ ID NO: 10180 - DNA, 20 bp, Artificial Sequence
  Synthetic: descartes_6093_SPP1
actccagttgtccccacagt

SEQ ID NO: 10181 - DNA, 20 bp, Artificial Sequence
  Synthetic: descartes_6094_SPP1
gggtctacaaccagcatatc

SEQ ID NO: 10182 - DNA, 20 bp, Artificial Sequence
  Synthetic: descartes_6095_SPP1
gccatgtggccacagcatct

SEQ ID NO: 10183 - DNA, 20 bp, Artificial Sequence
  Synthetic: descartes_6096_SPP1
acctcagtccataaaccaca

SEQ ID NO: 10184 - DNA, 20 bp, Artificial Sequence
  Synthetic: descartes_6097_SPP1
catgtgtgaggtgatgtcct

SEQ ID NO: 10185 - DNA, 20 bp, Artificial Sequence
  Synthetic: descartes_6098_SPP1
cctcctaggcatcacctgtg

SEQ ID NO: 10186 - DNA, 20 bp, Artificial Sequence
  Synthetic: descartes_6099_SPP1
ataactgtccttcccacggc

SEQ ID NO: 10187 - DNA, 20 bp, Artificial Sequence
  Synthetic: descartes_6100_SPPL3
actgctgctgagttgctgtc

SEQ ID NO: 10188 - DNA, 20 bp, Artificial Sequence
  Synthetic: descartes_6101_SPPL3
actgcaccctcatcggatac

SEQ ID NO: 10189 - DNA, 20 bp, Artificial Sequence
  Synthetic: descartes_6102_SPPL3
acaagaccctgctcacctca

SEQ ID NO: 10190 - DNA, 20 bp, Artificial Sequence
  Synthetic: descartes_6103_SPPL3
caggcagagacaggcgagga

SEQ ID NO: 10191 - DNA, 20 bp, Artificial Sequence
  Synthetic: descartes_6104_SPPL3
tcagcctacatcttcaatag

SEQ ID NO: 10192 - DNA, 20 bp, Artificial Sequence
  Synthetic: descartes_6105_SPPL3
tagttgtcatagcgaaggac

SEQ ID NO: 10193 - DNA, 20 bp, Artificial Sequence
  Synthetic: descartes_6106_SPPL3
tccttcgctatgacaactac

SEQ ID NO: 10194 - DNA, 20 bp, Artificial Sequence
  Synthetic: descartes_6107_SPPL3
ttctcctcccgatgtgccag

SEQ ID NO: 10195 - DNA, 20 bp, Artificial Sequence
  Synthetic: descartes_6108_SPRED2
gtgtagaccaagtcctttct

SEQ ID NO: 10196 - DNA, 20 bp, Artificial Sequence
  Synthetic: descartes_6109_SPRED2
cctccggtggatggctctta

SEQ ID NO: 10197 - DNA, 20 bp, Artificial Sequence
  Synthetic: descartes_6110_SPRED2
atcactggaaggtcgataat

SEQ ID NO: 10198 - DNA, 20 bp, Artificial Sequence
  Synthetic: descartes_6111_SPRED2
ctggccccctgtatgtgctg

SEQ ID NO: 10199 - DNA, 20 bp, Artificial Sequence
  Synthetic: descartes_6112_SPRED2
cttactcccctgtcaaaggc

SEQ ID NO: 10200 - DNA, 20 bp, Artificial Sequence
  Synthetic: descartes_6113_SPRED2
acaggggagtaaggaaagca

SEQ ID NO: 10201 - DNA, 20 bp, Artificial Sequence
  Synthetic: descartes_6114_SPRED2
gcctaggcgaggaccccaaa

SEQ ID NO: 10202 - DNA, 20 bp, Artificial Sequence
  Synthetic: descartes_6115_SPRED2
gacttactttccaaagccct

SEQ ID NO: 10203 - DNA, 20 bp, Artificial Sequence
  Synthetic: descartes_6116_SPRY2
ggatggctctgatctgatcc

SEQ ID NO: 10204 - DNA, 20 bp, Artificial Sequence
  Synthetic: descartes_6117_SPRY2
ggttgcacccggattatgcc

SEQ ID NO: 10205 - DNA, 20 bp, Artificial Sequence
  Synthetic: descartes_6118_SPRY2
acacagcatacacaagtccc

SEQ ID NO: 10206 - DNA, 20 bp, Artificial Sequence
  Synthetic: descartes_6119_SPRY2
cagcggcaaccaggcctgtt

SEQ ID NO: 10207 - DNA, 20 bp, Artificial Sequence
  Synthetic: descartes_6120_SPRY2
ctgcaaagttcccactgtcc

SEQ ID NO: 10208 - DNA, 20 bp, Artificial Sequence
  Synthetic: descartes_6121_SPRY2
aggcaacccttggctggaag

SEQ ID NO: 10209 - DNA, 20 bp, Artificial Sequence
  Synthetic: descartes_6122_SPRY2
tggtgttaccttccagccaa

SEQ ID NO: 10210 - DNA, 20 bp, Artificial Sequence
  Synthetic: descartes_6123_SPRY2
cacttgccacagtcctcaca

SEQ ID NO: 10211 - DNA, 20 bp, Artificial Sequence
  Synthetic: descartes_6124_SPTB
actgagccaggtctctctca

SEQ ID NO: 10212 - DNA, 20 bp, Artificial Sequence
  Synthetic: descartes_6125_SPTB
gggaagaagctgaatctctt

SEQ ID NO: 10213 - DNA, 20 bp, Artificial Sequence
  Synthetic: descartes_6126_SPTB
ccactacttctccaagatga

SEQ ID NO: 10214 - DNA, 20 bp, Artificial Sequence
  Synthetic: descartes_6127_SPTB
ggtggaggagaggctgcctc

SEQ ID NO: 10215 - DNA, 20 bp, Artificial Sequence
  Synthetic: descartes_6128_SPTB
cctccagctggaaggatggc

SEQ ID NO: 10216 - DNA, 20 bp, Artificial Sequence
  Synthetic: descartes_6129_SPTB
gggattccccagatgtgacc

SEQ ID NO: 10217 - DNA, 20 bp, Artificial Sequence
  Synthetic: descartes_6130_SPTB
ccatccagtcccggatgaga

SEQ ID NO: 10218 - DNA, 20 bp, Artificial Sequence
  Synthetic: descartes_6131_SPTB
ccaccatgcggccaccgaga

SEQ ID NO: 10219 - DNA, 20 bp, Artificial Sequence
  Synthetic: descartes_6132_SRC
agaggagcccatttacatcg

SEQ ID NO: 10220 - DNA, 20 bp, Artificial Sequence
  Synthetic: descartes_6133_SRC
atggccaccctggtggtacc

SEQ ID NO: 10221 - DNA, 20 bp, Artificial Sequence
  Synthetic: descartes_6134_SRC
catcgtcacggagtacatga

SEQ ID NO: 10222 - DNA, 20 bp, Artificial Sequence
  Synthetic: descartes_6135_SRC
gcaagatcaccagacgggag

SEQ ID NO: 10223 - DNA, 20 bp, Artificial Sequence
  Synthetic: descartes_6136_SRC
cccgcctcgcagacccccag

SEQ ID NO: 10224 - DNA, 20 bp, Artificial Sequence
  Synthetic: descartes_6137_SRC
ggctggctcggctcattgaa

SEQ ID NO: 10225 - DNA, 20 bp, Artificial Sequence
  Synthetic: descartes_6138_SRC
tcaagggggagacaggcaag

SEQ ID NO: 10226 - DNA, 20 bp, Artificial Sequence
  Synthetic: descartes_6139_SRC
gtggtctcactttctcgcac

SEQ ID NO: 10227 - DNA, 20 bp, Artificial Sequence
  Synthetic: descartes_6140_SRSF7
gccacactcatagcatctat

SEQ ID NO: 10228 - DNA, 20 bp, Artificial Sequence
  Synthetic: descartes_6141_SRSF7
atagaccacctgcccgacgt

SEQ ID NO: 10229 - DNA, 20 bp, Artificial Sequence
  Synthetic: descartes_6142_SRSF7
tcgcaatccatacagttctt

SEQ ID NO: 10230 - DNA, 20 bp, Artificial Sequence
  Synthetic: descartes_6143_SRSF7
gagatggagatctggacttt

SEQ ID NO: 10231 - DNA, 20 bp, Artificial Sequence
  Synthetic: descartes_6144_SRSF7
catccagtcctcgtactgca

SEQ ID NO: 10232 - DNA, 20 bp, Artificial Sequence
  Synthetic: descartes_6145_SRSF7
tagaaccagacctagatctt

SEQ ID NO: 10233 - DNA, 20 bp, Artificial Sequence
  Synthetic: descartes_6146_SRSF7
ccagcgccagttcccaggtt

SEQ ID NO: 10234 - DNA, 20 bp, Artificial Sequence
  Synthetic: descartes_6147_SRSF7
cctttgtggaattcgaagat

SEQ ID NO: 10235 - DNA, 20 bp, Artificial Sequence
  Synthetic: descartes_6148_STAG3
agagtggctgccagattata

SEQ ID NO: 10236 - DNA, 20 bp, Artificial Sequence
  Synthetic: descartes_6149_STAG3
cattctctggacactaaccc

SEQ ID NO: 10237 - DNA, 20 bp, Artificial Sequence
  Synthetic: descartes_6150_STAG3
ccagggaggtcatcagtttc

SEQ ID NO: 10238 - DNA, 20 bp, Artificial Sequence
  Synthetic: descartes_6151_STAG3
cccccgactcttccatcagg

SEQ ID NO: 10239 - DNA, 20 bp, Artificial Sequence
  Synthetic: descartes_6152_STAG3
catggtcatggacagagagt

SEQ ID NO: 10240 - DNA, 20 bp, Artificial Sequence
  Synthetic: descartes_6153_STAG3
ctgaagctactctccagtct

SEQ ID NO: 10241 - DNA, 20 bp, Artificial Sequence
  Synthetic: descartes_6154_STAG3
cccgcagccagctagtagat

SEQ ID NO: 10242 - DNA, 20 bp, Artificial Sequence
  Synthetic: descartes_6155_STAG3
cagactccacacaacccttc

SEQ ID NO: 10243 - DNA, 20 bp, Artificial Sequence
  Synthetic: descartes_6156_STAT3
ccaagcccccaattggaacc

SEQ ID NO: 10244 - DNA, 20 bp, Artificial Sequence
  Synthetic: descartes_6157_STAT3
gcccatgtgatctgacaccc

SEQ ID NO: 10245 - DNA, 20 bp, Artificial Sequence
  Synthetic: descartes_6158_STAT3
ctacaaaggggaccccattg

SEQ ID NO: 10246 - DNA, 20 bp, Artificial Sequence
  Synthetic: descartes_6159_STAT3
taaacagctccacgattctc

SEQ ID NO: 10247 - DNA, 20 bp, Artificial Sequence
  Synthetic: descartes_6160_STAT3
acattctgggcacaaacaca

SEQ ID NO: 10248 - DNA, 20 bp, Artificial Sequence
  Synthetic: descartes_6161_STAT3
ctgcaactcctccagtttct

SEQ ID NO: 10249 - DNA, 20 bp, Artificial Sequence
  Synthetic: descartes_6162_STAT3
acaaggtcaatgatattgtc

SEQ ID NO: 10250 - DNA, 20 bp, Artificial Sequence
  Synthetic: descartes_6163_STAT3
gcatctgacagatgttggag

SEQ ID NO: 10251 - DNA, 20 bp, Artificial Sequence
  Synthetic: descartes_6164_STAT5B
ccaccagagacttctccatt

SEQ ID NO: 10252 - DNA, 20 bp, Artificial Sequence
  Synthetic: descartes_6165_STAT5B
ccaggacggaattacacttt

SEQ ID NO: 10253 - DNA, 20 bp, Artificial Sequence
  Synthetic: descartes_6166_STAT5B
acacttccatcacaccgtca

SEQ ID NO: 10254 - DNA, 20 bp, Artificial Sequence
  Synthetic: descartes_6167_STAT5B
acggtgtgatggaagtgtta

SEQ ID NO: 10255 - DNA, 20 bp, Artificial Sequence
  Synthetic: descartes_6168_STAT5B
tgagtcactgaatctcagga

SEQ ID NO: 10256 - DNA, 20 bp, Artificial Sequence
  Synthetic: descartes_6169_STAT5B
gccgatcaggaaacacgtag

SEQ ID NO: 10257 - DNA, 20 bp, Artificial Sequence
  Synthetic: descartes_6170_STAT5B
ctgatcggccaaaagatgaa

SEQ ID NO: 10258 - DNA, 20 bp, Artificial Sequence
  Synthetic: descartes_6171_STAT5B
ccattgaggtgcggcattat

SEQ ID NO: 10259 - DNA, 20 bp, Artificial Sequence
  Synthetic: descartes_6172_STAT6
gtgaggtccaggacaccatc

SEQ ID NO: 10260 - DNA, 20 bp, Artificial Sequence
  Synthetic: descartes_6173_STAT6
atggtgtcctggacctcacc

SEQ ID NO: 10261 - DNA, 20 bp, Artificial Sequence
  Synthetic: descartes_6174_STAT6
aggagagcctggccccactc

SEQ ID NO: 10262 - DNA, 20 bp, Artificial Sequence
  Synthetic: descartes_6175_STAT6
gctgcctctagctctccagt

SEQ ID NO: 10263 - DNA, 20 bp, Artificial Sequence
  Synthetic: descartes_6176_STAT6
ccggggccaagtgtgaagct

SEQ ID NO: 10264 - DNA, 20 bp, Artificial Sequence
  Synthetic: descartes_6177_STAT6
agctgagcaagatcccggat

SEQ ID NO: 10265 - DNA, 20 bp, Artificial Sequence
  Synthetic: descartes_6178_STAT6
agacaaatacttcaaggaga

SEQ ID NO: 10266 - DNA, 20 bp, Artificial Sequence
  Synthetic: descartes_6179_STAT6
tgggggcatcttggagacca

SEQ ID NO: 10267 - DNA, 20 bp, Artificial Sequence
  Synthetic: descartes_6180_STK11
ctgcatgccacacacgcagt

SEQ ID NO: 10268 - DNA, 20 bp, Artificial Sequence
  Synthetic: descartes_6181_STK11
agggtgccaccggtggtgag

SEQ ID NO: 10269 - DNA, 20 bp, Artificial Sequence
  Synthetic: descartes_6182_STK11
tgccgtaacctcctcagtag

SEQ ID NO: 10270 - DNA, 20 bp, Artificial Sequence
  Synthetic: descartes_6183_STK11
tgcttctcttcgttgtataa

SEQ ID NO: 10271 - DNA, 20 bp, Artificial Sequence
  Synthetic: descartes_6184_STK11
gtgctcagctgcgccgcctc

SEQ ID NO: 10272 - DNA, 20 bp, Artificial Sequence
  Synthetic: descartes_6185_STK11
agaacatcgggaaggggagc

SEQ ID NO: 10273 - DNA, 20 bp, Artificial Sequence
  Synthetic: descartes_6186_STK11
cagccgcccgagattgccaa

SEQ ID NO: 10274 - DNA, 20 bp, Artificial Sequence
  Synthetic: descartes_6187_STK11
agcaggtcagagagcggggg

SEQ ID NO: 10275 - DNA, 20 bp, Artificial Sequence
  Synthetic: descartes_6188_STK31
agaagacgcaatggataata

SEQ ID NO: 10276 - DNA, 20 bp, Artificial Sequence
  Synthetic: descartes_6189_STK31
gtgaagtcaaaatctccaac

SEQ ID NO: 10277 - DNA, 20 bp, Artificial Sequence
  Synthetic: descartes_6190_STK31
aactcaggtgacatcaaact

SEQ ID NO: 10278 - DNA, 20 bp, Artificial Sequence
  Synthetic: descartes_6191_STK31
ggtcaagattccccaaaact

SEQ ID NO: 10279 - DNA, 20 bp, Artificial Sequence
  Synthetic: descartes_6192_STK31
atgtcacctgagttgaaaat

SEQ ID NO: 10280 - DNA, 20 bp, Artificial Sequence
  Synthetic: descartes_6193_STK31
ggaaaagacctttcagatgc

SEQ ID NO: 10281 - DNA, 20 bp, Artificial Sequence
  Synthetic: descartes_6194_STK31
ccctagggtagtatgggacc

SEQ ID NO: 10282 - DNA, 20 bp, Artificial Sequence
  Synthetic: descartes_6195_STK31
tagtgttgccaaaaagtata

SEQ ID NO: 10283 - DNA, 20 bp, Artificial Sequence
  Synthetic: descartes_6196_STOML2
cttgagactctgcacatatc

SEQ ID NO: 10284 - DNA, 20 bp, Artificial Sequence
  Synthetic: descartes_6197_STOML2
gtgagggctccatatacacc

SEQ ID NO: 10285 - DNA, 20 bp, Artificial Sequence
  Synthetic: descartes_6198_STOML2
gccttggccttcgccagaac

SEQ ID NO: 10286 - DNA, 20 bp, Artificial Sequence
  Synthetic: descartes_6199_STOML2
cctgcgcatcatggaccctt

SEQ ID NO: 10287 - DNA, 20 bp, Artificial Sequence
  Synthetic: descartes_6200_STOML2
gagaacgcgctgacatactg

SEQ ID NO: 10288 - DNA, 20 bp, Artificial Sequence
  Synthetic: descartes_6201_STOML2
ccgagctctgatctcatggt

SEQ ID NO: 10289 - DNA, 20 bp, Artificial Sequence
  Synthetic: descartes_6202_STOML2
acccggggtggcacatggat

SEQ ID NO: 10290 - DNA, 20 bp, Artificial Sequence
  Synthetic: descartes_6203_STOML2
aacatcctcatccctgtgtt

SEQ ID NO: 10291 - DNA, 20 bp, Artificial Sequence
  Synthetic: descartes_6204_STX1B
acctgctccacatcctccga

SEQ ID NO: 10292 - DNA, 20 bp, Artificial Sequence
  Synthetic: descartes_6205_STX1B
tcaatgcagccccggatctc

SEQ ID NO: 10293 - DNA, 20 bp, Artificial Sequence
  Synthetic: descartes_6206_STX1B
gaccgaaccttgttggccgt

SEQ ID NO: 10294 - DNA, 20 bp, Artificial Sequence
  Synthetic: descartes_6207_STX1B
tggacatggccatgctcgta

SEQ ID NO: 10295 - DNA, 20 bp, Artificial Sequence
  Synthetic: descartes_6208_STX1B
actgctttcttggtgtcaga

SEQ ID NO: 10296 - DNA, 20 bp, Artificial Sequence
  Synthetic: descartes_6209_STX1B
ttggtgtcagacacagctcg

SEQ ID NO: 10297 - DNA, 20 bp, Artificial Sequence
  Synthetic: descartes_6210_STX1B
aatttggaccgaaccttgtt

SEQ ID NO: 10298 - DNA, 20 bp, Artificial Sequence
  Synthetic: descartes_6211_STX1B
ctgtgtggtgctgggggtgg

SEQ ID NO: 10299 - DNA, 20 bp, Artificial Sequence
  Synthetic: descartes_6212_STX7
ctgaggacagctcaaaagaa

SEQ ID NO: 10300 - DNA, 20 bp, Artificial Sequence
  Synthetic: descartes_6213_STX7
gatctctgcccaccaccccc

SEQ ID NO: 10301 - DNA, 20 bp, Artificial Sequence
  Synthetic: descartes_6214_STX7
ggaatgatgattcatgaaca

SEQ ID NO: 10302 - DNA, 20 bp, Artificial Sequence
  Synthetic: descartes_6215_STX7
ccaggatacaagattccttt

SEQ ID NO: 10303 - DNA, 20 bp, Artificial Sequence
  Synthetic: descartes_6216_STX7
cttgctgaacgtgcacctct

SEQ ID NO: 10304 - DNA, 20 bp, Artificial Sequence
  Synthetic: descartes_6217_STX7
ttcatcctgcacctgcactt

SEQ ID NO: 10305 - DNA, 20 bp, Artificial Sequence
  Synthetic: descartes_6218_STX7
tcagtgatgttgtgaactct

SEQ ID NO: 10306 - DNA, 20 bp, Artificial Sequence
  Synthetic: descartes_6219_STX7
tttggcaagctggttagtat

SEQ ID NO: 10307 - DNA, 20 bp, Artificial Sequence
  Synthetic: descartes_6220_SUPT6H
atcccactgccagactctcc

SEQ ID NO: 10308 - DNA, 20 bp, Artificial Sequence
  Synthetic: descartes_6221_SUPT6H
agaggctgtccatcatcatc

SEQ ID NO: 10309 - DNA, 20 bp, Artificial Sequence
  Synthetic: descartes_6222_SUPT6H
gggagaacctgcgggatagc

SEQ ID NO: 10310 - DNA, 20 bp, Artificial Sequence
  Synthetic: descartes_6223_SUPT6H
gtggggatgaagccggtgac

SEQ ID NO: 10311 - DNA, 20 bp, Artificial Sequence
  Synthetic: descartes_6224_SUPT6H
gcatgaagcccagggcctct

SEQ ID NO: 10312 - DNA, 20 bp, Artificial Sequence
  Synthetic: descartes_6225_SUPT6H
aagcaagcagaaaagatgat

SEQ ID NO: 10313 - DNA, 20 bp, Artificial Sequence
  Synthetic: descartes_6226_SUPT6H
accctcagcctcatcatcct

SEQ ID NO: 10314 - DNA, 20 bp, Artificial Sequence
  Synthetic: descartes_6227_SUPT6H
cgaggtcccaggccacaaac

SEQ ID NO: 10315 - DNA, 20 bp, Artificial Sequence
  Synthetic: descartes_6228_SUSD4
atggaaccctaggctggatc

SEQ ID NO: 10316 - DNA, 20 bp, Artificial Sequence
  Synthetic: descartes_6229_SUSD4
actgccaagacggattcaag

SEQ ID NO: 10317 - DNA, 20 bp, Artificial Sequence
  Synthetic: descartes_6230_SUSD4
catagccattagaagaggct

SEQ ID NO: 10318 - DNA, 20 bp, Artificial Sequence
  Synthetic: descartes_6231_SUSD4
ccctgtgttaaagtcctctc

SEQ ID NO: 10319 - DNA, 20 bp, Artificial Sequence
  Synthetic: descartes_6232_SUSD4
ctgcgatcctggctacagcc

SEQ ID NO: 10320 - DNA, 20 bp, Artificial Sequence
  Synthetic: descartes_6233_SUSD4
atgcagtagacttgataaga

SEQ ID NO: 10321 - DNA, 20 bp, Artificial Sequence
  Synthetic: descartes_6234_SUSD4
cttcttatcaagtctactgc

SEQ ID NO: 10322 - DNA, 20 bp, Artificial Sequence
  Synthetic: descartes_6235_SUSD4
gtctgccacccgcggccttg

SEQ ID NO: 10323 - DNA, 20 bp, Artificial Sequence
  Synthetic: descartes_6236_SUV39H1
cctacaatgaccagggccag

SEQ ID NO: 10324 - DNA, 20 bp, Artificial Sequence
  Synthetic: descartes_6237_SUV39H1
aagtcgagtacctgtgcgat

SEQ ID NO: 10325 - DNA, 20 bp, Artificial Sequence
  Synthetic: descartes_6238_SUV39H1
taagtccttgtggaactgct

SEQ ID NO: 10326 - DNA, 20 bp, Artificial Sequence
  Synthetic: descartes_6239_SUV39H1
ccacaagaaccatccgggca

SEQ ID NO: 10327 - DNA, 20 bp, Artificial Sequence
  Synthetic: descartes_6240_SUV39H1
acctggactacgtggaggac

SEQ ID NO: 10328 - DNA, 20 bp, Artificial Sequence
  Synthetic: descartes_6241_SUV39H1
gcctggctgggctccctggc

SEQ ID NO: 10329 - DNA, 20 bp, Artificial Sequence
  Synthetic: descartes_6242_SUV39H1
cggcaggactcagtcccaca

SEQ ID NO: 10330 - DNA, 20 bp, Artificial Sequence
  Synthetic: descartes_6243_SUV39H1
accggtggtgccgccggagc

SEQ ID NO: 10331 - DNA, 20 bp, Artificial Sequence
  Synthetic: descartes_6244_SUV39H2
gagggcccaccttcagactt

SEQ ID NO: 10332 - DNA, 20 bp, Artificial Sequence
  Synthetic: descartes_6245_SUV39H2
gctgggctgtggtcaataga

SEQ ID NO: 10333 - DNA, 20 bp, Artificial Sequence
  Synthetic: descartes_6246_SUV39H2
gcttataataaaaaccaaca

SEQ ID NO: 10334 - DNA, 20 bp, Artificial Sequence
  Synthetic: descartes_6247_SUV39H2
acttgatactcttcaggaat

SEQ ID NO: 10335 - DNA, 20 bp, Artificial Sequence
  Synthetic: descartes_6248_SUV39H2
aaagaagcaatctgtgcatg

SEQ ID NO: 10336 - DNA, 20 bp, Artificial Sequence
  Synthetic: descartes_6249_SUV39H2
cctgagataaataattatgc

SEQ ID NO: 10337 - DNA, 20 bp, Artificial Sequence
  Synthetic: descartes_6250_SUV39H2
attgataacctcgatactcg

SEQ ID NO: 10338 - DNA, 20 bp, Artificial Sequence
  Synthetic: descartes_6251_SUV39H2
gccttcttcacaatgtactc

SEQ ID NO: 10339 - DNA, 20 bp, Artificial Sequence
  Synthetic: descartes_6252_SWAP70
tctgaggacaagtatccatt

SEQ ID NO: 10340 - DNA, 20 bp, Artificial Sequence
  Synthetic: descartes_6253_SWAP70
ggtacatgtcttccagctcc

SEQ ID NO: 10341 - DNA, 20 bp, Artificial Sequence
  Synthetic: descartes_6254_SWAP70
actgaggcagaacttgaaga

SEQ ID NO: 10342 - DNA, 20 bp, Artificial Sequence
  Synthetic: descartes_6255_SWAP70
atccaagagaatgtctcctt

SEQ ID NO: 10343 - DNA, 20 bp, Artificial Sequence
  Synthetic: descartes_6256_SWAP70
gtacaaaccatctttcagtc

SEQ ID NO: 10344 - DNA, 20 bp, Artificial Sequence
  Synthetic: descartes_6257_SWAP70
caataagctcaataagttcc

SEQ ID NO: 10345 - DNA, 20 bp, Artificial Sequence
  Synthetic: descartes_6258_SWAP70
ctgtcatcaaagttgatttt

SEQ ID NO: 10346 - DNA, 20 bp, Artificial Sequence
  Synthetic: descartes_6259_SWAP70
acacagagggtccaacacat

SEQ ID NO: 10347 - DNA, 20 bp, Artificial Sequence
  Synthetic: descartes_6260_SYK
cctggaccgaaagctgctga

SEQ ID NO: 10348 - DNA, 20 bp, Artificial Sequence
  Synthetic: descartes_6261_SYK
acatgggacagtaagaactc

SEQ ID NO: 10349 - DNA, 20 bp, Artificial Sequence
  Synthetic: descartes_6262_SYK
gaggccgtccacaacttcca

SEQ ID NO: 10350 - DNA, 20 bp, Artificial Sequence
  Synthetic: descartes_6263_SYK
ctggagaacttgtagtagtt

SEQ ID NO: 10351 - DNA, 20 bp, Artificial Sequence
  Synthetic: descartes_6264_SYK
atgggctgtggtagcgatca

SEQ ID NO: 10352 - DNA, 20 bp, Artificial Sequence
  Synthetic: descartes_6265_SYK
aaggaaaacctcatcaggga

SEQ ID NO: 10353 - DNA, 20 bp, Artificial Sequence
  Synthetic: descartes_6266_SYK
catgggcatgaagtacttgg

SEQ ID NO: 10354 - DNA, 20 bp, Artificial Sequence
  Synthetic: descartes_6267_SYK
ggtccaggtaaacctccttg

SEQ ID NO: 10355 - DNA, 20 bp, Artificial Sequence
  Synthetic: descartes_6268_TAB2
gtggcacaggacctacaaat

SEQ ID NO: 10356 - DNA, 20 bp, Artificial Sequence
  Synthetic: descartes_6269_TAB2
acttaggcagcaaaggaaca

SEQ ID NO: 10357 - DNA, 20 bp, Artificial Sequence
  Synthetic: descartes_6270_TAB2
cctgtggactgttaagtaca

SEQ ID NO: 10358 - DNA, 20 bp, Artificial Sequence
  Synthetic: descartes_6271_TAB2
ggaggatggtgatgaataaa

SEQ ID NO: 10359 - DNA, 20 bp, Artificial Sequence
  Synthetic: descartes_6272_TAB2
accccagcgctattcataac

SEQ ID NO: 10360 - DNA, 20 bp, Artificial Sequence
  Synthetic: descartes_6273_TAB2
catgacctgcgacaaaaatt

SEQ ID NO: 10361 - DNA, 20 bp, Artificial Sequence
  Synthetic: descartes_6274_TAB2
gtacaccagaaggccagaat

SEQ ID NO: 10362 - DNA, 20 bp, Artificial Sequence
  Synthetic: descartes_6275_TAB2
gaggtcctgttgaaatattc

SEQ ID NO: 10363 - DNA, 20 bp, Artificial Sequence
  Synthetic: descartes_6276_TAF1
ggactgtctcacagcgaaca

SEQ ID NO: 10364 - DNA, 20 bp, Artificial Sequence
  Synthetic: descartes_6277_TAF1
gcagtacaaatatccttctc

SEQ ID NO: 10365 - DNA, 20 bp, Artificial Sequence
  Synthetic: descartes_6278_TAF1
ggtcaggacgctccttcatt

SEQ ID NO: 10366 - DNA, 20 bp, Artificial Sequence
  Synthetic: descartes_6279_TAF1
cctaagagaattcgactctt

SEQ ID NO: 10367 - DNA, 20 bp, Artificial Sequence
  Synthetic: descartes_6280_TAF1
gtttaccaacggaagaagag

SEQ ID NO: 10368 - DNA, 20 bp, Artificial Sequence
  Synthetic: descartes_6281_TAF1
tatgataccaacacatccct

SEQ ID NO: 10369 - DNA, 20 bp, Artificial Sequence
  Synthetic: descartes_6282_TAF1
acatcctccccatcccagat

SEQ ID NO: 10370 - DNA, 20 bp, Artificial Sequence
  Synthetic: descartes_6283_TAF1
gagttaggcccaggaacttc

SEQ ID NO: 10371 - DNA, 20 bp, Artificial Sequence
  Synthetic: descartes_6284_TAF1L
gctgtacaaatatccttctc

SEQ ID NO: 10372 - DNA, 20 bp, Artificial Sequence
  Synthetic: descartes_6285_TAF1L
ccatcctcctcctcatcatc

SEQ ID NO: 10373 - DNA, 20 bp, Artificial Sequence
  Synthetic: descartes_6286_TAF1L
ggactgtctcacagcgaaca

SEQ ID NO: 10374 - DNA, 20 bp, Artificial Sequence
  Synthetic: descartes_6287_TAF1L
gagaccatacgtaagaacat

SEQ ID NO: 10375 - DNA, 20 bp, Artificial Sequence
  Synthetic: descartes_6288_TAF1L
gtgctccagtgtatcttcat

SEQ ID NO: 10376 - DNA, 20 bp, Artificial Sequence
  Synthetic: descartes_6289_TAF1L
gtttaccaacggaagaagag

SEQ ID NO: 10377 - DNA, 20 bp, Artificial Sequence
  Synthetic: descartes_6290_TAF1L
gtgtgcctgaggaagagatt

SEQ ID NO: 10378 - DNA, 20 bp, Artificial Sequence
  Synthetic: descartes_6291_TAF1L
atatcctccccatcccagat

SEQ ID NO: 10379 - DNA, 20 bp, Artificial Sequence
  Synthetic: descartes_6292_TAF3
cctctccctatctctctgct

SEQ ID NO: 10380 - DNA, 20 bp, Artificial Sequence
  Synthetic: descartes_6293_TAF3
ctgttagcaagaacaatgta

SEQ ID NO: 10381 - DNA, 20 bp, Artificial Sequence
  Synthetic: descartes_6294_TAF3
cctggatagtctctttactg

SEQ ID NO: 10382 - DNA, 20 bp, Artificial Sequence
  Synthetic: descartes_6295_TAF3
cgtacaacctcatcaatgga

SEQ ID NO: 10383 - DNA, 20 bp, Artificial Sequence
  Synthetic: descartes_6296_TAF3
gtcttctgtcctggagagct

SEQ ID NO: 10384 - DNA, 20 bp, Artificial Sequence
  Synthetic: descartes_6297_TAF3
actgagtgtagctgaaggag

SEQ ID NO: 10385 - DNA, 20 bp, Artificial Sequence
  Synthetic: descartes_6298_TAF3
ctgggcaagagaccactgga

SEQ ID NO: 10386 - DNA, 20 bp, Artificial Sequence
  Synthetic: descartes_6299_TAF3
ggtgtaaatgactttgtttc

SEQ ID NO: 10387 - DNA, 20 bp, Artificial Sequence
  Synthetic: descartes_6300_TANK
gcttgtcaataatagtctgt

SEQ ID NO: 10388 - DNA, 20 bp, Artificial Sequence
  Synthetic: descartes_6301_TANK
ccaccatccattacatccag

SEQ ID NO: 10389 - DNA, 20 bp, Artificial Sequence
  Synthetic: descartes_6302_TANK
aggaatagcaagagaaaaac

SEQ ID NO: 10390 - DNA, 20 bp, Artificial Sequence
  Synthetic: descartes_6303_TANK
ccacctggagaccataatgc

SEQ ID NO: 10391 - DNA, 20 bp, Artificial Sequence
  Synthetic: descartes_6304_TANK
actgtcttcaagcagaggaa

SEQ ID NO: 10392 - DNA, 20 bp, Artificial Sequence
  Synthetic: descartes_6305_TANK
tccgtacactgtataggcac

SEQ ID NO: 10393 - DNA, 20 bp, Artificial Sequence
  Synthetic: descartes_6306_TANK
agatcccagaaagtcttctc

SEQ ID NO: 10394 - DNA, 20 bp, Artificial Sequence
  Synthetic: descartes_6307_TANK
atatggagttcagagacaac

SEQ ID NO: 10395 - DNA, 20 bp, Artificial Sequence
  Synthetic: descartes_6308_TAP1
cgggccgcctcactgactgg

SEQ ID NO: 10396 - DNA, 20 bp, Artificial Sequence
  Synthetic: descartes_6309_TAP1
gagtgaaggtatcggctgag

SEQ ID NO: 10397 - DNA, 20 bp, Artificial Sequence
  Synthetic: descartes_6310_TAP1
cgagagccccgccctcgttc

SEQ ID NO: 10398 - DNA, 20 bp, Artificial Sequence
  Synthetic: descartes_6311_TAP1
gctcttggagccaaccgttg

SEQ ID NO: 10399 - DNA, 20 bp, Artificial Sequence
  Synthetic: descartes_6312_TAP1
aagccattagctgcggcact

SEQ ID NO: 10400 - DNA, 20 bp, Artificial Sequence
  Synthetic: descartes_6313_TAP1
tgccacagggctgctgcggg

SEQ ID NO: 10401 - DNA, 20 bp, Artificial Sequence
  Synthetic: descartes_6314_TAP1
cagagccgccctgaccgccg

SEQ ID NO: 10402 - DNA, 20 bp, Artificial Sequence
  Synthetic: descartes_6315_TAP1
gggctgtcctgcgccaggag

SEQ ID NO: 10403 - DNA, 20 bp, Artificial Sequence
  Synthetic: descartes_6316_TAP2
aaggaagccagttactcatc

SEQ ID NO: 10404 - DNA, 20 bp, Artificial Sequence
  Synthetic: descartes_6317_TAP2
gcagcccccacagccctccc

SEQ ID NO: 10405 - DNA, 20 bp, Artificial Sequence
  Synthetic: descartes_6318_TAP2
gctgtcggtccatgtaggag

SEQ ID NO: 10406 - DNA, 20 bp, Artificial Sequence
  Synthetic: descartes_6319_TAP2
tcctacatggaccgacagcc

SEQ ID NO: 10407 - DNA, 20 bp, Artificial Sequence
  Synthetic: descartes_6320_TAP2
atccagcagcacctgtcccc

SEQ ID NO: 10408 - DNA, 20 bp, Artificial Sequence
  Synthetic: descartes_6321_TAP2
acaaccccctgcagagtggt

SEQ ID NO: 10409 - DNA, 20 bp, Artificial Sequence
  Synthetic: descartes_6322_TAP2
agttgggcaggagcctgtgc

SEQ ID NO: 10410 - DNA, 20 bp, Artificial Sequence
  Synthetic: descartes_6323_TAP2
tgtcccgcagccagctggct

SEQ ID NO: 10411 - DNA, 20 bp, Artificial Sequence
  Synthetic: descartes_6324_TARM1
ttctcaggaagggaggaatt

SEQ ID NO: 10412 - DNA, 20 bp, Artificial Sequence
  Synthetic: descartes_6325_TARM1
acctcaataatctaaaagtc

SEQ ID NO: 10413 - DNA, 20 bp, Artificial Sequence
  Synthetic: descartes_6326_TARM1
gattattgaggtgaaattcg

SEQ ID NO: 10414 - DNA, 20 bp, Artificial Sequence
  Synthetic: descartes_6327_TARM1
tgacttttagattattgagg

SEQ ID NO: 10415 - DNA, 20 bp, Artificial Sequence
  Synthetic: descartes_6328_TARM1
tgtagtattcacaggtgtac

SEQ ID NO: 10416 - DNA, 20 bp, Artificial Sequence
  Synthetic: descartes_6329_TARM1
acagcacagtgacgtccttc

SEQ ID NO: 10417 - DNA, 20 bp, Artificial Sequence
  Synthetic: descartes_6330_TARM1
tctaaacctttcctccgaac

SEQ ID NO: 10418 - DNA, 20 bp, Artificial Sequence
  Synthetic: descartes_6331_TARM1
ctccgaacctaccaaagggg

SEQ ID NO: 10419 - DNA, 20 bp, Artificial Sequence
  Synthetic: descartes_6332_TBX21
atcagcaccagacagagatg

SEQ ID NO: 10420 - DNA, 20 bp, Artificial Sequence
  Synthetic: descartes_6333_TBX21
cccgacacctccagtcccgc

SEQ ID NO: 10421 - DNA, 20 bp, Artificial Sequence
  Synthetic: descartes_6334_TBX21
ggaaactaaagctcacaaac

SEQ ID NO: 10422 - DNA, 20 bp, Artificial Sequence
  Synthetic: descartes_6335_TBX21
ataaggaagctgaaggacag

SEQ ID NO: 10423 - DNA, 20 bp, Artificial Sequence
  Synthetic: descartes_6336_TBX21
gtttcccaaatgaaacttcc

SEQ ID NO: 10424 - DNA, 20 bp, Artificial Sequence
  Synthetic: descartes_6337_TBX21
atttgggaaactaaagctca

SEQ ID NO: 10425 - DNA, 20 bp, Artificial Sequence
  Synthetic: descartes_6338_TBX21
gagcagtcagcatgaagcct

SEQ ID NO: 10426 - DNA, 20 bp, Artificial Sequence
  Synthetic: descartes_6339_TBX21
caagaaacccagttcattgc

SEQ ID NO: 10427 - DNA, 20 bp, Artificial Sequence
  Synthetic: descartes_6340_TCEAL9
gattaaccttccaacgcatc

SEQ ID NO: 10428 - DNA, 20 bp, Artificial Sequence
  Synthetic: descartes_6341_TCEAL9
gcctcctcctctagcttctc

SEQ ID NO: 10429 - DNA, 20 bp, Artificial Sequence
  Synthetic: descartes_6342_TCEAL9
gagaaaggctgattcaatct

SEQ ID NO: 10430 - DNA, 20 bp, Artificial Sequence
  Synthetic: descartes_6343_TCEAL9
gagaagtggatgaaatagat

SEQ ID NO: 10431 - DNA, 20 bp, Artificial Sequence
  Synthetic: descartes_6344_TCEAL9
tgactctccttatctcatct

SEQ ID NO: 10432 - DNA, 20 bp, Artificial Sequence
  Synthetic: descartes_6345_TCEAL9
aagaagatatacacaacagg

SEQ ID NO: 10433 - DNA, 20 bp, Artificial Sequence
  Synthetic: descartes_6346_TCEAL9
ctttggcctcctcctctagc

SEQ ID NO: 10434 - DNA, 20 bp, Artificial Sequence
  Synthetic: descartes_6347_TCEAL9
atccacttctctaaacatat

SEQ ID NO: 10435 - DNA, 20 bp, Artificial Sequence
  Synthetic: descartes_6348_TCF19
gtccaccccaactaggggag

SEQ ID NO: 10436 - DNA, 20 bp, Artificial Sequence
  Synthetic: descartes_6349_TCF19
gtcaataatgtccgactccc

SEQ ID NO: 10437 - DNA, 20 bp, Artificial Sequence
  Synthetic: descartes_6350_TCF19
ggatcagtgtggccttgggg

SEQ ID NO: 10438 - DNA, 20 bp, Artificial Sequence
  Synthetic: descartes_6351_TCF19
cggcctatgctgccctccca

SEQ ID NO: 10439 - DNA, 20 bp, Artificial Sequence
  Synthetic: descartes_6352_TCF19
cccaggtggggcgggaacag

SEQ ID NO: 10440 - DNA, 20 bp, Artificial Sequence
  Synthetic: descartes_6353_TCF19
ttcctgggctccataaggac

SEQ ID NO: 10441 - DNA, 20 bp, Artificial Sequence
  Synthetic: descartes_6354_TCF19
gccctgaagggcccccagga

SEQ ID NO: 10442 - DNA, 20 bp, Artificial Sequence
  Synthetic: descartes_6355_TCF19
ctgccattaccatcccacgg

SEQ ID NO: 10443 - DNA, 20 bp, Artificial Sequence
  Synthetic: descartes_6356_TCF20
gcggtcttgttctgcaaggg

SEQ ID NO: 10444 - DNA, 20 bp, Artificial Sequence
  Synthetic: descartes_6357_TCF20
cccttacatccatgtagtaa

SEQ ID NO: 10445 - DNA, 20 bp, Artificial Sequence
  Synthetic: descartes_6358_TCF20
agagggctccgtactctgtc

SEQ ID NO: 10446 - DNA, 20 bp, Artificial Sequence
  Synthetic: descartes_6359_TCF20
gctggagaagtttgccgaga

SEQ ID NO: 10447 - DNA, 20 bp, Artificial Sequence
  Synthetic: descartes_6360_TCF20
gaggtacaggtggcagtagt

SEQ ID NO: 10448 - DNA, 20 bp, Artificial Sequence
  Synthetic: descartes_6361_TCF20
cgagcagaactgagcctagc

SEQ ID NO: 10449 - DNA, 20 bp, Artificial Sequence
  Synthetic: descartes_6362_TCF20
accgaagcaagagggtttcc

SEQ ID NO: 10450 - DNA, 20 bp, Artificial Sequence
  Synthetic: descartes_6363_TCF20
gtgtccatggaaaccaagct

SEQ ID NO: 10451 - DNA, 20 bp, Artificial Sequence
  Synthetic: descartes_6364_TDRD1
gaatacatgaaccaactctc

SEQ ID NO: 10452 - DNA, 20 bp, Artificial Sequence
  Synthetic: descartes_6365_TDRD1
gaagcacctccttgtaagat

SEQ ID NO: 10453 - DNA, 20 bp, Artificial Sequence
  Synthetic: descartes_6366_TDRD1
agaggaagagaagaatatgt

SEQ ID NO: 10454 - DNA, 20 bp, Artificial Sequence
  Synthetic: descartes_6367_TDRD1
ggagcattgcagtattctaa

SEQ ID NO: 10455 - DNA, 20 bp, Artificial Sequence
  Synthetic: descartes_6368_TDRD1
aaaccagatgttcatcaatc

SEQ ID NO: 10456 - DNA, 20 bp, Artificial Sequence
  Synthetic: descartes_6369_TDRD1
gcttacgcttctgaagaatc

SEQ ID NO: 10457 - DNA, 20 bp, Artificial Sequence
  Synthetic: descartes_6370_TDRD1
aatgtgggcaaccacaccac

SEQ ID NO: 10458 - DNA, 20 bp, Artificial Sequence
  Synthetic: descartes_6371_TDRD1
ctgtctcctttggagccaac

SEQ ID NO: 10459 - DNA, 20 bp, Artificial Sequence
  Synthetic: descartes_6372_TDRD10
tctgtctcacacaggtcaac

SEQ ID NO: 10460 - DNA, 20 bp, Artificial Sequence
  Synthetic: descartes_6373_TDRD10
gcttgtggaagagtttacca

SEQ ID NO: 10461 - DNA, 20 bp, Artificial Sequence
  Synthetic: descartes_6374_TDRD10
tgctcctccaacactccatt

SEQ ID NO: 10462 - DNA, 20 bp, Artificial Sequence
  Synthetic: descartes_6375_TDRD10
cctttgaggattcgatggac

SEQ ID NO: 10463 - DNA, 20 bp, Artificial Sequence
  Synthetic: descartes_6376_TDRD10
ccattcagctcctggattgc

SEQ ID NO: 10464 - DNA, 20 bp, Artificial Sequence
  Synthetic: descartes_6377_TDRD10
tgcatggagcccagatctac

SEQ ID NO: 10465 - DNA, 20 bp, Artificial Sequence
  Synthetic: descartes_6378_TDRD10
ccaaatccttcaccagaagc

SEQ ID NO: 10466 - DNA, 20 bp, Artificial Sequence
  Synthetic: descartes_6379_TDRD10
ggaagaatggagtgttggag

SEQ ID NO: 10467 - DNA, 20 bp, Artificial Sequence
  Synthetic: descartes_6380_TDRD12
ggtgaatctctcaatgaatc

SEQ ID NO: 10468 - DNA, 20 bp, Artificial Sequence
  Synthetic: descartes_6381_TDRD12
gctcctcacaatagaccaca

SEQ ID NO: 10469 - DNA, 20 bp, Artificial Sequence
  Synthetic: descartes_6382_TDRD12
gatcatgatgtcgattatca

SEQ ID NO: 10470 - DNA, 20 bp, Artificial Sequence
  Synthetic: descartes_6383_TDRD12
taataacccagaagcaacct

SEQ ID NO: 10471 - DNA, 20 bp, Artificial Sequence
  Synthetic: descartes_6384_TDRD12
cctttatgtaactataaaag

SEQ ID NO: 10472 - DNA, 20 bp, Artificial Sequence
  Synthetic: descartes_6385_TDRD12
gaaaaaccaagattgaatat

SEQ ID NO: 10473 - DNA, 20 bp, Artificial Sequence
  Synthetic: descartes_6386_TDRD12
ctctatagggaagctgcata

SEQ ID NO: 10474 - DNA, 20 bp, Artificial Sequence
  Synthetic: descartes_6387_TDRD12
ccaagaacattccagtcaaa

SEQ ID NO: 10475 - DNA, 20 bp, Artificial Sequence
  Synthetic: descartes_6388_TDRD15
gatgtggatctgacaatatc

SEQ ID NO: 10476 - DNA, 20 bp, Artificial Sequence
  Synthetic: descartes_6389_TDRD15
gcaataccaacagattcatc

SEQ ID NO: 10477 - DNA, 20 bp, Artificial Sequence
  Synthetic: descartes_6390_TDRD15
gatgtataataactaaggca

SEQ ID NO: 10478 - DNA, 20 bp, Artificial Sequence
  Synthetic: descartes_6391_TDRD15
agtgatgacagctctgtaaa

SEQ ID NO: 10479 - DNA, 20 bp, Artificial Sequence
  Synthetic: descartes_6392_TDRD15
ccataaaactctcaactgca

SEQ ID NO: 10480 - DNA, 20 bp, Artificial Sequence
  Synthetic: descartes_6393_TDRD15
atagataccacaatctacta

SEQ ID NO: 10481 - DNA, 20 bp, Artificial Sequence
  Synthetic: descartes_6394_TDRD15
gtggaagaaagagtatctgg

SEQ ID NO: 10482 - DNA, 20 bp, Artificial Sequence
  Synthetic: descartes_6395_TDRD15
gcagattcagtagcagtaat

SEQ ID NO: 10483 - DNA, 20 bp, Artificial Sequence
  Synthetic: descartes_6396_TDRD3
ggttaccagcagcattcata

SEQ ID NO: 10484 - DNA, 20 bp, Artificial Sequence
  Synthetic: descartes_6397_TDRD3
gattccaagaaatcaaataa

SEQ ID NO: 10485 - DNA, 20 bp, Artificial Sequence
  Synthetic: descartes_6398_TDRD3
gaggaggatgtctcagatga

SEQ ID NO: 10486 - DNA, 20 bp, Artificial Sequence
  Synthetic: descartes_6399_TDRD3
atgtaaatactgattatcag

SEQ ID NO: 10487 - DNA, 20 bp, Artificial Sequence
  Synthetic: descartes_6400_TDRD3
aaagagactcccaaaattca

SEQ ID NO: 10488 - DNA, 20 bp, Artificial Sequence
  Synthetic: descartes_6401_TDRD3
ccaggtcctcttcatcttca

SEQ ID NO: 10489 - DNA, 20 bp, Artificial Sequence
  Synthetic: descartes_6402_TDRD3
gaaggcagtggattacctag

SEQ ID NO: 10490 - DNA, 20 bp, Artificial Sequence
  Synthetic: descartes_6403_TDRD3
aaagcaccatcactatgctg

SEQ ID NO: 10491 - DNA, 20 bp, Artificial Sequence
  Synthetic: descartes_6404_TDRD5
ggatgagaactggttacctc

SEQ ID NO: 10492 - DNA, 20 bp, Artificial Sequence
  Synthetic: descartes_6405_TDRD5
aagagcaactatcaccaaaa

SEQ ID NO: 10493 - DNA, 20 bp, Artificial Sequence
  Synthetic: descartes_6406_TDRD5
tcagaagctctacattcctc

SEQ ID NO: 10494 - DNA, 20 bp, Artificial Sequence
  Synthetic: descartes_6407_TDRD5
tgtagagcagaccagagcag

SEQ ID NO: 10495 - DNA, 20 bp, Artificial Sequence
  Synthetic: descartes_6408_TDRD5
gaatgaaacaagggtcatac

SEQ ID NO: 10496 - DNA, 20 bp, Artificial Sequence
  Synthetic: descartes_6409_TDRD5
agtgagctcaaccctttagc

SEQ ID NO: 10497 - DNA, 20 bp, Artificial Sequence
  Synthetic: descartes_6410_TDRD5
ctgagcacccagtacttctg

SEQ ID NO: 10498 - DNA, 20 bp, Artificial Sequence
  Synthetic: descartes_6411_TDRD5
gcatcaacaaagaacctgct

SEQ ID NO: 10499 - DNA, 20 bp, Artificial Sequence
  Synthetic: descartes_6412_TDRD6
actgagagcatacctgctaa

SEQ ID NO: 10500 - DNA, 20 bp, Artificial Sequence
  Synthetic: descartes_6413_TDRD6
gaagtagaagtacagactgc

SEQ ID NO: 10501 - DNA, 20 bp, Artificial Sequence
  Synthetic: descartes_6414_TDRD6
ggtatgccattccagacatt

SEQ ID NO: 10502 - DNA, 20 bp, Artificial Sequence
  Synthetic: descartes_6415_TDRD6
atatcatgtgtagaatagaa

SEQ ID NO: 10503 - DNA, 20 bp, Artificial Sequence
  Synthetic: descartes_6416_TDRD6
gaaacagctgaagaaggaac

SEQ ID NO: 10504 - DNA, 20 bp, Artificial Sequence
  Synthetic: descartes_6417_TDRD6
ggatcacaatctgctccatg

SEQ ID NO: 10505 - DNA, 20 bp, Artificial Sequence
  Synthetic: descartes_6418_TDRD6
actcccagccttaagatcta

SEQ ID NO: 10506 - DNA, 20 bp, Artificial Sequence
  Synthetic: descartes_6419_TDRD6
gatccaacagtaaaggcttt

SEQ ID NO: 10507 - DNA, 20 bp, Artificial Sequence
  Synthetic: descartes_6420_TDRD7
cctacactagaagcctatct

SEQ ID NO: 10508 - DNA, 20 bp, Artificial Sequence
  Synthetic: descartes_6421_TDRD7
actaaaaccatagtcaacat

SEQ ID NO: 10509 - DNA, 20 bp, Artificial Sequence
  Synthetic: descartes_6422_TDRD7
ccacagaagggtaatgaaac

SEQ ID NO: 10510 - DNA, 20 bp, Artificial Sequence
  Synthetic: descartes_6423_TDRD7
ccataatccagctcatacac

SEQ ID NO: 10511 - DNA, 20 bp, Artificial Sequence
  Synthetic: descartes_6424_TDRD7
gcagatcttccacaatctat

SEQ ID NO: 10512 - DNA, 20 bp, Artificial Sequence
  Synthetic: descartes_6425_TDRD7
gaaacaccatagaagcctcc

SEQ ID NO: 10513 - DNA, 20 bp, Artificial Sequence
  Synthetic: descartes_6426_TDRD7
tgtgcaggccatggcatagc

SEQ ID NO: 10514 - DNA, 20 bp, Artificial Sequence
  Synthetic: descartes_6427_TDRD7
cccctaagaacttccctgac

SEQ ID NO: 10515 - DNA, 20 bp, Artificial Sequence
  Synthetic: descartes_6428_TDRD9
acttgaccacactgtctaaa

SEQ ID NO: 10516 - DNA, 20 bp, Artificial Sequence
  Synthetic: descartes_6429_TDRD9
cctataagtcgatacaagga

SEQ ID NO: 10517 - DNA, 20 bp, Artificial Sequence
  Synthetic: descartes_6430_TDRD9
gatagaaagcacctgccaat

SEQ ID NO: 10518 - DNA, 20 bp, Artificial Sequence
  Synthetic: descartes_6431_TDRD9
agtccagtccctgggtacag

SEQ ID NO: 10519 - DNA, 20 bp, Artificial Sequence
  Synthetic: descartes_6432_TDRD9
ctataaacaactacagtctc

SEQ ID NO: 10520 - DNA, 20 bp, Artificial Sequence
  Synthetic: descartes_6433_TDRD9
gattgagaaggagagcatca

SEQ ID NO: 10521 - DNA, 20 bp, Artificial Sequence
  Synthetic: descartes_6434_TDRD9
gttgagacatcttaattgcc

SEQ ID NO: 10522 - DNA, 20 bp, Artificial Sequence
  Synthetic: descartes_6435_TDRD9
acttgaactcagcgttcatt

SEQ ID NO: 10523 - DNA, 20 bp, Artificial Sequence
  Synthetic: descartes_6436_TDRKH
gctccagatgccttacagat

SEQ ID NO: 10524 - DNA, 20 bp, Artificial Sequence
  Synthetic: descartes_6437_TDRKH
cctatacctgcggtatagga

SEQ ID NO: 10525 - DNA, 20 bp, Artificial Sequence
  Synthetic: descartes_6438_TDRKH
gtctcagtgagcaacgtgct

SEQ ID NO: 10526 - DNA, 20 bp, Artificial Sequence
  Synthetic: descartes_6439_TDRKH
atgctgatgagtacctagaa

SEQ ID NO: 10527 - DNA, 20 bp, Artificial Sequence
  Synthetic: descartes_6440_TDRKH
cgtgggaccctggtttctgc

SEQ ID NO: 10528 - DNA, 20 bp, Artificial Sequence
  Synthetic: descartes_6441_TDRKH
cctacaaatggttcctggta

SEQ ID NO: 10529 - DNA, 20 bp, Artificial Sequence
  Synthetic: descartes_6442_TDRKH
atagactcactcattgtgct

SEQ ID NO: 10530 - DNA, 20 bp, Artificial Sequence
  Synthetic: descartes_6443_TDRKH
tgcttctgagcaccctaacc

SEQ ID NO: 10531 - DNA, 20 bp, Artificial Sequence
  Synthetic: descartes_6444_TEC
ctgtgaagtggtgtccacct

SEQ ID NO: 10532 - DNA, 20 bp, Artificial Sequence
  Synthetic: descartes_6445_TEC
agtagagacgtactgctgag

SEQ ID NO: 10533 - DNA, 20 bp, Artificial Sequence
  Synthetic: descartes_6446_TEC
tctacaacactgataacttc

SEQ ID NO: 10534 - DNA, 20 bp, Artificial Sequence
  Synthetic: descartes_6447_TEC
acagggaatgacaccatcat

SEQ ID NO: 10535 - DNA, 20 bp, Artificial Sequence
  Synthetic: descartes_6448_TEC
tctccagatactccatccct

SEQ ID NO: 10536 - DNA, 20 bp, Artificial Sequence
  Synthetic: descartes_6449_TEC
agtttgtctacaacactgat

SEQ ID NO: 10537 - DNA, 20 bp, Artificial Sequence
  Synthetic: descartes_6450_TEC
ataagaatctcctccaaaat

SEQ ID NO: 10538 - DNA, 20 bp, Artificial Sequence
  Synthetic: descartes_6451_TEC
tgctgggtgcacacaccata

SEQ ID NO: 10539 - DNA, 20 bp, Artificial Sequence
  Synthetic: descartes_6452_TESPA1
accaccccctctcaggccaa

SEQ ID NO: 10540 - DNA, 20 bp, Artificial Sequence
  Synthetic: descartes_6453_TESPA1
tgaggaagcaggacagttta

SEQ ID NO: 10541 - DNA, 20 bp, Artificial Sequence
  Synthetic: descartes_6454_TESPA1
ctcttcacagcagaagacac

SEQ ID NO: 10542 - DNA, 20 bp, Artificial Sequence
  Synthetic: descartes_6455_TESPA1
ggatggtgctagcactgtgg

SEQ ID NO: 10543 - DNA, 20 bp, Artificial Sequence
  Synthetic: descartes_6456_TESPA1
gacaggtgtcttagacacat

SEQ ID NO: 10544 - DNA, 20 bp, Artificial Sequence
  Synthetic: descartes_6457_TESPA1
gccaagaggatcacaaagac

SEQ ID NO: 10545 - DNA, 20 bp, Artificial Sequence
  Synthetic: descartes_6458_TESPA1
agcaggtgcaaacactggct

SEQ ID NO: 10546 - DNA, 20 bp, Artificial Sequence
  Synthetic: descartes_6459_TESPA1
cgtattggtggctggtagac

SEQ ID NO: 10547 - DNA, 20 bp, Artificial Sequence
  Synthetic: descartes_6460_TET2
gaagaacaccaccactaccc

SEQ ID NO: 10548 - DNA, 20 bp, Artificial Sequence
  Synthetic: descartes_6461_TET2
gcttcccaaagagccaagcc

SEQ ID NO: 10549 - DNA, 20 bp, Artificial Sequence
  Synthetic: descartes_6462_TET2
gtagcagtggagagctacag

SEQ ID NO: 10550 - DNA, 20 bp, Artificial Sequence
  Synthetic: descartes_6463_TET2
agagaataaagaacagacta

SEQ ID NO: 10551 - DNA, 20 bp, Artificial Sequence
  Synthetic: descartes_6464_TET2
actagacaaaccactgctgc

SEQ ID NO: 10552 - DNA, 20 bp, Artificial Sequence
  Synthetic: descartes_6465_TET2
ccagaagcaagatcccaagg

SEQ ID NO: 10553 - DNA, 20 bp, Artificial Sequence
  Synthetic: descartes_6466_TET2
gccgaaaagaactcagtacc

SEQ ID NO: 10554 - DNA, 20 bp, Artificial Sequence
  Synthetic: descartes_6467_TET2
agatatgcccatctcctgca

SEQ ID NO: 10555 - DNA, 20 bp, Artificial Sequence
  Synthetic: descartes_6468_TFE3
aaggaacggcagaagaaaga

SEQ ID NO: 10556 - DNA, 20 bp, Artificial Sequence
  Synthetic: descartes_6469_TFE3
taattctatgtcagcaacaa

SEQ ID NO: 10557 - DNA, 20 bp, Artificial Sequence
  Synthetic: descartes_6470_TFE3
atcattgtaactggactcca

SEQ ID NO: 10558 - DNA, 20 bp, Artificial Sequence
  Synthetic: descartes_6471_TFE3
agctcgtagaagctgtcagg

SEQ ID NO: 10559 - DNA, 20 bp, Artificial Sequence
  Synthetic: descartes_6472_TFE3
ccagcgaccacctgggggac

SEQ ID NO: 10560 - DNA, 20 bp, Artificial Sequence
  Synthetic: descartes_6473_TFE3
cttggccacgacttcggctt

SEQ ID NO: 10561 - DNA, 20 bp, Artificial Sequence
  Synthetic: descartes_6474_TFE3
atgttgggcagctcagctgg

SEQ ID NO: 10562 - DNA, 20 bp, Artificial Sequence
  Synthetic: descartes_6475_TFE3
gagcgctgctgctccttctg

SEQ ID NO: 10563 - DNA, 20 bp, Artificial Sequence
  Synthetic: descartes_6476_TFEB
ggagagccctgggctgggct

SEQ ID NO: 10564 - DNA, 20 bp, Artificial Sequence
  Synthetic: descartes_6477_TFEB
ctgcccacatcagcccagcc

SEQ ID NO: 10565 - DNA, 20 bp, Artificial Sequence
  Synthetic: descartes_6478_TFEB
aggattgatgtagccaagga

SEQ ID NO: 10566 - DNA, 20 bp, Artificial Sequence
  Synthetic: descartes_6479_TFEB
caggtccttctgcatcctcc

SEQ ID NO: 10567 - DNA, 20 bp, Artificial Sequence
  Synthetic: descartes_6480_TFEB
ggggcagggaggacgagggt

SEQ ID NO: 10568 - DNA, 20 bp, Artificial Sequence
  Synthetic: descartes_6481_TFEB
ttctgccgctccttggccag

SEQ ID NO: 10569 - DNA, 20 bp, Artificial Sequence
  Synthetic: descartes_6482_TFRC
gtggagaaccattgtcatat

SEQ ID NO: 10570 - DNA, 20 bp, Artificial Sequence
  Synthetic: descartes_6483_TFRC
agcccagcagaagcattatc

SEQ ID NO: 10571 - DNA, 20 bp, Artificial Sequence
  Synthetic: descartes_6484_TFRC
ggtaccaccatggacaccta

SEQ ID NO: 10572 - DNA, 20 bp, Artificial Sequence
  Synthetic: descartes_6485_TFRC
gtctggtccatgtatatcaa

SEQ ID NO: 10573 - DNA, 20 bp, Artificial Sequence
  Synthetic: descartes_6486_TFRC
cagtcagagggacagtctcc

SEQ ID NO: 10574 - DNA, 20 bp, Artificial Sequence
  Synthetic: descartes_6487_TFRC
cctgctctgacaatcactat

SEQ ID NO: 10575 - DNA, 20 bp, Artificial Sequence
  Synthetic: descartes_6488_TFRC
gtaccaaaattagcatggac

SEQ ID NO: 10576 - DNA, 20 bp, Artificial Sequence
  Synthetic: descartes_6489_TFRC
aataggagagctgtgcctac

SEQ ID NO: 10577 - DNA, 20 bp, Artificial Sequence
  Synthetic: descartes_6490_TGFB1
acttgagcctcagcagacgc

SEQ ID NO: 10578 - DNA, 20 bp, Artificial Sequence
  Synthetic: descartes_6491_TGFB1
gagcctggacacgcagtaca

SEQ ID NO: 10579 - DNA, 20 bp, Artificial Sequence
  Synthetic: descartes_6492_TGFB1
gccttagcgcccactgctcc

SEQ ID NO: 10580 - DNA, 20 bp, Artificial Sequence
  Synthetic: descartes_6493_TGFB1
atgtcaccggagttgtgcgg

SEQ ID NO: 10581 - DNA, 20 bp, Artificial Sequence
  Synthetic: descartes_6494_TGFB1
caccattagcacgcgggtga

SEQ ID NO: 10582 - DNA, 20 bp, Artificial Sequence
  Synthetic: descartes_6495_TGFB1
ctgcttctcatggccacccc

SEQ ID NO: 10583 - DNA, 20 bp, Artificial Sequence
  Synthetic: descartes_6496_TGFB1
cagatgctgggccctctcca

SEQ ID NO: 10584 - DNA, 20 bp, Artificial Sequence
  Synthetic: descartes_6497_TGFBR2
ccatgaccccaagctcccct

SEQ ID NO: 10585 - DNA, 20 bp, Artificial Sequence
  Synthetic: descartes_6498_TGFBR2
gggagccgtcttcaggaatc

SEQ ID NO: 10586 - DNA, 20 bp, Artificial Sequence
  Synthetic: descartes_6499_TGFBR2
ccagagcaccagagccatgg

SEQ ID NO: 10587 - DNA, 20 bp, Artificial Sequence
  Synthetic: descartes_6500_TGFBR2
ccaggttgaactcagcttct

SEQ ID NO: 10588 - DNA, 20 bp, Artificial Sequence
  Synthetic: descartes_6501_TGFBR2
cctatgaggagtatgcctct

SEQ ID NO: 10589 - DNA, 20 bp, Artificial Sequence
  Synthetic: descartes_6502_TGFBR2
cctgcgtctggaccctactc

SEQ ID NO: 10590 - DNA, 20 bp, Artificial Sequence
  Synthetic: descartes_6503_TGFBR2
gagaagcagcatcttccaga

SEQ ID NO: 10591 - DNA, 20 bp, Artificial Sequence
  Synthetic: descartes_6504_TGFBR2
aagtgacaggcatcagcctc

SEQ ID NO: 10592 - DNA, 20 bp, Artificial Sequence
  Synthetic: descartes_6505_THEMIS
acaggccagaacattcacca

SEQ ID NO: 10593 - DNA, 20 bp, Artificial Sequence
  Synthetic: descartes_6506_THEMIS
tctagggatgcagaaccatt

SEQ ID NO: 10594 - DNA, 20 bp, Artificial Sequence
  Synthetic: descartes_6507_THEMIS
atatctccgcatcatgtaat

SEQ ID NO: 10595 - DNA, 20 bp, Artificial Sequence
  Synthetic: descartes_6508_THEMIS
aacaggagaagtgattaaaa

SEQ ID NO: 10596 - DNA, 20 bp, Artificial Sequence
  Synthetic: descartes_6509_THEMIS
gtggatgaagagaaagaaag

SEQ ID NO: 10597 - DNA, 20 bp, Artificial Sequence
  Synthetic: descartes_6510_THEMIS
tagtcaggactctggtagaa

SEQ ID NO: 10598 - DNA, 20 bp, Artificial Sequence
  Synthetic: descartes_6511_THEMIS
aaataagtgggactcaacga

SEQ ID NO: 10599 - DNA, 20 bp, Artificial Sequence
  Synthetic: descartes_6512_THEMIS
ttatcatgaatcacctctac

SEQ ID NO: 10600 - DNA, 20 bp, Artificial Sequence
  Synthetic: descartes_6513_THEMIS2
gtggaggagatgagtgacag

SEQ ID NO: 10601 - DNA, 20 bp, Artificial Sequence
  Synthetic: descartes_6514_THEMIS2
caaggagcccacccacgggc

SEQ ID NO: 10602 - DNA, 20 bp, Artificial Sequence
  Synthetic: descartes_6515_THEMIS2
cccctgtccatggagatcct

SEQ ID NO: 10603 - DNA, 20 bp, Artificial Sequence
  Synthetic: descartes_6516_THEMIS2
actgccttgtgaggtcaagg

SEQ ID NO: 10604 - DNA, 20 bp, Artificial Sequence
  Synthetic: descartes_6517_THEMIS2
atagctctgtggggtgttga

SEQ ID NO: 10605 - DNA, 20 bp, Artificial Sequence
  Synthetic: descartes_6518_THEMIS2
cgtctatggcctagcctcac

SEQ ID NO: 10606 - DNA, 20 bp, Artificial Sequence
  Synthetic: descartes_6519_THEMIS2
ggcagccgagcgtgttgctg

SEQ ID NO: 10607 - DNA, 20 bp, Artificial Sequence
  Synthetic: descartes_6520_THEMIS2
ttcataatcatgttcatcat

SEQ ID NO: 10608 - DNA, 20 bp, Artificial Sequence
  Synthetic: descartes_6521_THOC1
gatacaggttgtaatcaatt

SEQ ID NO: 10609 - DNA, 20 bp, Artificial Sequence
  Synthetic: descartes_6522_THOC1
gtgggtcctttccctaggaa

SEQ ID NO: 10610 - DNA, 20 bp, Artificial Sequence
  Synthetic: descartes_6523_THOC1
ccagaatatcttgaaaatat

SEQ ID NO: 10611 - DNA, 20 bp, Artificial Sequence
  Synthetic: descartes_6524_THOC1
aatacaaatgagcaggaaag

SEQ ID NO: 10612 - DNA, 20 bp, Artificial Sequence
  Synthetic: descartes_6525_THOC1
gattgaagatactacaaaat

SEQ ID NO: 10613 - DNA, 20 bp, Artificial Sequence
  Synthetic: descartes_6526_THOC1
agaggtattctagaagaaga

SEQ ID NO: 10614 - DNA, 20 bp, Artificial Sequence
  Synthetic: descartes_6527_THOC1
agagttataaattagatgat

SEQ ID NO: 10615 - DNA, 20 bp, Artificial Sequence
  Synthetic: descartes_6528_THOC1
actgatgagcaatcactttg

SEQ ID NO: 10616 - DNA, 20 bp, Artificial Sequence
  Synthetic: descartes_6529_TLR4
ggacaaccagcctaaagtat

SEQ ID NO: 10617 - DNA, 20 bp, Artificial Sequence
  Synthetic: descartes_6530_TLR4
cctggtgagtgtgactattg

SEQ ID NO: 10618 - DNA, 20 bp, Artificial Sequence
  Synthetic: descartes_6531_TLR4
cttataagtgtctgaactcc

SEQ ID NO: 10619 - DNA, 20 bp, Artificial Sequence
  Synthetic: descartes_6532_TLR4
aatatcacctgtcagatgaa

SEQ ID NO: 10620 - DNA, 20 bp, Artificial Sequence
  Synthetic: descartes_6533_TLR4
ccagaactgcaggtgctgga

SEQ ID NO: 10621 - DNA, 20 bp, Artificial Sequence
  Synthetic: descartes_6534_TLR4
agtattcctatcactcagaa

SEQ ID NO: 10622 - DNA, 20 bp, Artificial Sequence
  Synthetic: descartes_6535_TLR4
attggatacgtttccttata

SEQ ID NO: 10623 - DNA, 20 bp, Artificial Sequence
  Synthetic: descartes_6536_TLR4
aatgtgggaaactgtccaaa

SEQ ID NO: 10624 - DNA, 20 bp, Artificial Sequence
  Synthetic: descartes_6537_TLR8
tgagcaacacccagatcaaa

SEQ ID NO: 10625 - DNA, 20 bp, Artificial Sequence
  Synthetic: descartes_6538_TLR8
actgatagcctatctgactt

SEQ ID NO: 10626 - DNA, 20 bp, Artificial Sequence
  Synthetic: descartes_6539_TLR8
ccttagctaaacacacatta

SEQ ID NO: 10627 - DNA, 20 bp, Artificial Sequence
  Synthetic: descartes_6540_TLR8
cgtgtagttccaacatagat

SEQ ID NO: 10628 - DNA, 20 bp, Artificial Sequence
  Synthetic: descartes_6541_TLR8
actggacattactccagcag

SEQ ID NO: 10629 - DNA, 20 bp, Artificial Sequence
  Synthetic: descartes_6542_TLR8
tcatcacaaggatagcttct

SEQ ID NO: 10630 - DNA, 20 bp, Artificial Sequence
  Synthetic: descartes_6543_TLR8
atcacacacataacgaatga

SEQ ID NO: 10631 - DNA, 20 bp, Artificial Sequence
  Synthetic: descartes_6544_TLR8
agttccaatctgctaaaaac

SEQ ID NO: 10632 - DNA, 20 bp, Artificial Sequence
  Synthetic: descartes_6545_TMEM116
ccagacagaatacaggtgtc

SEQ ID NO: 10633 - DNA, 20 bp, Artificial Sequence
  Synthetic: descartes_6546_TMEM116
agcccctgctatagaatctc

SEQ ID NO: 10634 - DNA, 20 bp, Artificial Sequence
  Synthetic: descartes_6547_TMEM116
ctgccagtacttctaccatt

SEQ ID NO: 10635 - DNA, 20 bp, Artificial Sequence
  Synthetic: descartes_6548_TMEM116
atcctcagctctgtgtacaa

SEQ ID NO: 10636 - DNA, 20 bp, Artificial Sequence
  Synthetic: descartes_6549_TMEM116
tctacaccgtcaattacatc

SEQ ID NO: 10637 - DNA, 20 bp, Artificial Sequence
  Synthetic: descartes_6550_TMEM116
tgtatattatggaatacagc

SEQ ID NO: 10638 - DNA, 20 bp, Artificial Sequence
  Synthetic: descartes_6551_TMEM116
ctgggcagctttgtactcag

SEQ ID NO: 10639 - DNA, 20 bp, Artificial Sequence
  Synthetic: descartes_6552_TMEM116
tctgagcttctgtgacctgc

SEQ ID NO: 10640 - DNA, 20 bp, Artificial Sequence
  Synthetic: descartes_6553_TMEM131L
cctggacccaaacacatccc

SEQ ID NO: 10641 - DNA, 20 bp, Artificial Sequence
  Synthetic: descartes_6554_TMEM131L
acatagagactcatgagaac

SEQ ID NO: 10642 - DNA, 20 bp, Artificial Sequence
  Synthetic: descartes_6555_TMEM131L
cttaggaaacatacatgtct

SEQ ID NO: 10643 - DNA, 20 bp, Artificial Sequence
  Synthetic: descartes_6556_TMEM131L
gaatggactcttctgcaacc

SEQ ID NO: 10644 - DNA, 20 bp, Artificial Sequence
  Synthetic: descartes_6557_TMEM131L
ccatgaaataatgcatgcca

SEQ ID NO: 10645 - DNA, 20 bp, Artificial Sequence
  Synthetic: descartes_6558_TMEM131L
acacctgctgactatggaaa

SEQ ID NO: 10646 - DNA, 20 bp, Artificial Sequence
  Synthetic: descartes_6559_TMEM131L
ctgaatgtaatatatacata

SEQ ID NO: 10647 - DNA, 20 bp, Artificial Sequence
  Synthetic: descartes_6560_TMEM131L
tgagaaacaggacatacctt

SEQ ID NO: 10648 - DNA, 20 bp, Artificial Sequence
  Synthetic: descartes_6561_TMEM43
gctgtggtagaaaaagtctc

SEQ ID NO: 10649 - DNA, 20 bp, Artificial Sequence
  Synthetic: descartes_6562_TMEM43
gctggcacccgtgtccgagc

SEQ ID NO: 10650 - DNA, 20 bp, Artificial Sequence
  Synthetic: descartes_6563_TMEM43
atagagaactaaggagcaac

SEQ ID NO: 10651 - DNA, 20 bp, Artificial Sequence
  Synthetic: descartes_6564_TMEM43
acagccggaagatggacccc

SEQ ID NO: 10652 - DNA, 20 bp, Artificial Sequence
  Synthetic: descartes_6565_TMEM43
tacccattggtacatctcca

SEQ ID NO: 10653 - DNA, 20 bp, Artificial Sequence
  Synthetic: descartes_6566_TMEM43
taccacagcgaaaatcccaa

SEQ ID NO: 10654 - DNA, 20 bp, Artificial Sequence
  Synthetic: descartes_6567_TMEM43
ctatgctggactgagcggcg

SEQ ID NO: 10655 - DNA, 20 bp, Artificial Sequence
  Synthetic: descartes_6568_TMEM43
cgagacctggtcaacattgg

SEQ ID NO: 10656 - DNA, 20 bp, Artificial Sequence
  Synthetic: descartes_6569_TMEM47
tatagacctgttgcggtcat

SEQ ID NO: 10657 - DNA, 20 bp, Artificial Sequence
  Synthetic: descartes_6570_TMEM47
ccatgagttcaactggggtt

SEQ ID NO: 10658 - DNA, 20 bp, Artificial Sequence
  Synthetic: descartes_6571_TMEM47
aatgaacttgattgggtaaa

SEQ ID NO: 10659 - DNA, 20 bp, Artificial Sequence
  Synthetic: descartes_6572_TMEM47
cggcaggactcccacaacga

SEQ ID NO: 10660 - DNA, 20 bp, Artificial Sequence
  Synthetic: descartes_6573_TMEM47
gtttgggggtgccatccttt

SEQ ID NO: 10661 - DNA, 20 bp, Artificial Sequence
  Synthetic: descartes_6574_TMEM47
aagctcacagtttcaatgaa

SEQ ID NO: 10662 - DNA, 20 bp, Artificial Sequence
  Synthetic: descartes_6575_TMEM47
caggtttgcagcctggtcct

SEQ ID NO: 10663 - DNA, 20 bp, Artificial Sequence
  Synthetic: descartes_6576_TMEM47
cccaatcaagttcattgaaa

SEQ ID NO: 10664 - DNA, 20 bp, Artificial Sequence
  Synthetic: descartes_6577_TMIGD2
ctggcagctgcggcggcccc

SEQ ID NO: 10665 - DNA, 20 bp, Artificial Sequence
  Synthetic: descartes_6578_TMIGD2
gggccccccggggccggtat

SEQ ID NO: 10666 - DNA, 20 bp, Artificial Sequence
  Synthetic: descartes_6579_TMIGD2
gcctcggctgctgggtgggg

SEQ ID NO: 10667 - DNA, 20 bp, Artificial Sequence
  Synthetic: descartes_6580_TMIGD2
ttcaacctccttcccgcaac

SEQ ID NO: 10668 - DNA, 20 bp, Artificial Sequence
  Synthetic: descartes_6581_TMIGD2
tccacttaacacggagccgt

SEQ ID NO: 10669 - DNA, 20 bp, Artificial Sequence
  Synthetic: descartes_6582_TMIGD2
gggaacccttttggcctcgg

SEQ ID NO: 10670 - DNA, 20 bp, Artificial Sequence
  Synthetic: descartes_6583_TNFAIP3
gggagatcatccacaaagcc

SEQ ID NO: 10671 - DNA, 20 bp, Artificial Sequence
  Synthetic: descartes_6584_TNFAIP3
atgggatctgcagtacttgc

SEQ ID NO: 10672 - DNA, 20 bp, Artificial Sequence
  Synthetic: descartes_6585_TNFAIP3
atgaggccaaaaggacagaa

SEQ ID NO: 10673 - DNA, 20 bp, Artificial Sequence
  Synthetic: descartes_6586_TNFAIP3
attgaagctcagaatcagag

SEQ ID NO: 10674 - DNA, 20 bp, Artificial Sequence
  Synthetic: descartes_6587_TNFAIP3
tctgtactcgatgaaacaca

SEQ ID NO: 10675 - DNA, 20 bp, Artificial Sequence
  Synthetic: descartes_6588_TNFAIP3
tgttcagtgagaccactgcc

SEQ ID NO: 10676 - DNA, 20 bp, Artificial Sequence
  Synthetic: descartes_6589_TNFAIP3
acagatcctgaaaatgagat

SEQ ID NO: 10677 - DNA, 20 bp, Artificial Sequence
  Synthetic: descartes_6590_TNFAIP3
aagcaagtactgcagatccc

SEQ ID NO: 10678 - DNA, 20 bp, Artificial Sequence
  Synthetic: descartes_6591_TNFRSF11A
agaggacatgggagtccaat

SEQ ID NO: 10679 - DNA, 20 bp, Artificial Sequence
  Synthetic: descartes_6592_TNFRSF11A
ctatagcaaacgccaaagat

SEQ ID NO: 10680 - DNA, 20 bp, Artificial Sequence
  Synthetic: descartes_6593_TNFRSF11A
tctgtcccatgatgttctac

SEQ ID NO: 10681 - DNA, 20 bp, Artificial Sequence
  Synthetic: descartes_6594_TNFRSF11A
gggaacccacgaggggttca

SEQ ID NO: 10682 - DNA, 20 bp, Artificial Sequence
  Synthetic: descartes_6595_TNFRSF11A
ctccacggacaaatgcagac

SEQ ID NO: 10683 - DNA, 20 bp, Artificial Sequence
  Synthetic: descartes_6596_TNFRSF11A
ccgtgtgtgtactgacacaa

SEQ ID NO: 10684 - DNA, 20 bp, Artificial Sequence
  Synthetic: descartes_6597_TNFRSF11A
ctataggaaaaaagggaaag

SEQ ID NO: 10685 - DNA, 20 bp, Artificial Sequence
  Synthetic: descartes_6598_TNFRSF11A
tagctggcagagaagaactg

SEQ ID NO: 10686 - DNA, 20 bp, Artificial Sequence
  Synthetic: descartes_6599_TNFRSF13B
aacttctccactccgctgtc

SEQ ID NO: 10687 - DNA, 20 bp, Artificial Sequence
  Synthetic: descartes_6600_TNFRSF13B
caggacatgcaggtacccag

SEQ ID NO: 10688 - DNA, 20 bp, Artificial Sequence
  Synthetic: descartes_6601_TNFRSF13B
caaccatcagagccagcgca

SEQ ID NO: 10689 - DNA, 20 bp, Artificial Sequence
  Synthetic: descartes_6602_TNFRSF13B
acggggccttgagcggggct

SEQ ID NO: 10690 - DNA, 20 bp, Artificial Sequence
  Synthetic: descartes_6603_TNFRSF14
tctcagggagcctcgtcatc

SEQ ID NO: 10691 - DNA, 20 bp, Artificial Sequence
  Synthetic: descartes_6604_TNFRSF14
ggctcctccccgtgaatgag

SEQ ID NO: 10692 - DNA, 20 bp, Artificial Sequence
  Synthetic: descartes_6605_TNFRSF14
acacatatgattaggccaac

SEQ ID NO: 10693 - DNA, 20 bp, Artificial Sequence
  Synthetic: descartes_6606_TNFRSF14
gcactgcagacacttgctta

SEQ ID NO: 10694 - DNA, 20 bp, Artificial Sequence
  Synthetic: descartes_6607_TNFRSF14
ggggtggatctccagggagg

SEQ ID NO: 10695 - DNA, 20 bp, Artificial Sequence
  Synthetic: descartes_6608_TNFRSF14
ctccacagttggcctaatca

SEQ ID NO: 10696 - DNA, 20 bp, Artificial Sequence
  Synthetic: descartes_6609_TNFRSF14
ttcttttcacacatatgatt

SEQ ID NO: 10697 - DNA, 20 bp, Artificial Sequence
  Synthetic: descartes_6610_TNFRSF17
ggagcactgcccagccatct

SEQ ID NO: 10698 - DNA, 20 bp, Artificial Sequence
  Synthetic: descartes_6611_TNFRSF17
tctatctccgtagcactcaa

SEQ ID NO: 10699 - DNA, 20 bp, Artificial Sequence
  Synthetic: descartes_6612_TNFRSF17
gtggtgacaagaatggttgc

SEQ ID NO: 10700 - DNA, 20 bp, Artificial Sequence
  Synthetic: descartes_6613_TNFRSF17
agtgctacggagatagagaa

SEQ ID NO: 10701 - DNA, 20 bp, Artificial Sequence
  Synthetic: descartes_6614_TNFRSF17
ctaaggaagataaactctga

SEQ ID NO: 10702 - DNA, 20 bp, Artificial Sequence
  Synthetic: descartes_6615_TNFRSF17
ggactgagcttaataatttc

SEQ ID NO: 10703 - DNA, 20 bp, Artificial Sequence
  Synthetic: descartes_6616_TNFRSF17
tcttccttagcaaaaacatt

SEQ ID NO: 10704 - DNA, 20 bp, Artificial Sequence
  Synthetic: descartes_6617_TNFRSF17
ctcttgatgcagtcttcaca

SEQ ID NO: 10705 - DNA, 20 bp, Artificial Sequence
  Synthetic: descartes_6618_TNFRSF21
cggatactgcacaccacaat

SEQ ID NO: 10706 - DNA, 20 bp, Artificial Sequence
  Synthetic: descartes_6619_TNFRSF21
tcctcagcctggggaatctc

SEQ ID NO: 10707 - DNA, 20 bp, Artificial Sequence
  Synthetic: descartes_6620_TNFRSF21
gaaagtggagcatgtcatca

SEQ ID NO: 10708 - DNA, 20 bp, Artificial Sequence
  Synthetic: descartes_6621_TNFRSF21
atcacactagaaggcacatc

SEQ ID NO: 10709 - DNA, 20 bp, Artificial Sequence
  Synthetic: descartes_6622_TNFRSF21
ggagggtcttgttcacgtct

SEQ ID NO: 10710 - DNA, 20 bp, Artificial Sequence
  Synthetic: descartes_6623_TNFRSF21
gaatagccggtctagtttgt

SEQ ID NO: 10711 - DNA, 20 bp, Artificial Sequence
  Synthetic: descartes_6624_TNFRSF21
gtctaacagaggcagaagag

SEQ ID NO: 10712 - DNA, 20 bp, Artificial Sequence
  Synthetic: descartes_6625_TNFRSF21
tctatgccattctcatgcct

SEQ ID NO: 10713 - DNA, 20 bp, Artificial Sequence
  Synthetic: descartes_6626_TNFRSF9
gaggacagggactgcaaatc

SEQ ID NO: 10714 - DNA, 20 bp, Artificial Sequence
  Synthetic: descartes_6627_TNFRSF9
tgagaccagtacaaactact

SEQ ID NO: 10715 - DNA, 20 bp, Artificial Sequence
  Synthetic: descartes_6628_TNFRSF9
aggaccaggaaggagtgttc

SEQ ID NO: 10716 - DNA, 20 bp, Artificial Sequence
  Synthetic: descartes_6629_TNFRSF9
agaggacaagatcattgcag

SEQ ID NO: 10717 - DNA, 20 bp, Artificial Sequence
  Synthetic: descartes_6630_TNFRSF9
gatggaaagtctgtgcttgt

SEQ ID NO: 10718 - DNA, 20 bp, Artificial Sequence
  Synthetic: descartes_6631_TNFRSF9
actgcctgggggcaggatgc

SEQ ID NO: 10719 - DNA, 20 bp, Artificial Sequence
  Synthetic: descartes_6632_TNFRSF9
cagaagaagaagaaggagga

SEQ ID NO: 10720 - DNA, 20 bp, Artificial Sequence
  Synthetic: descartes_6633_TNFRSF9
cagtccctgtcctccaaata

SEQ ID NO: 10721 - DNA, 20 bp, Artificial Sequence
  Synthetic: descartes_6634_TNFSF13
acaaaccccaggaaggttcc

SEQ ID NO: 10722 - DNA, 20 bp, Artificial Sequence
  Synthetic: descartes_6635_TNFSF13
ggtgagcactgctctccttt

SEQ ID NO: 10723 - DNA, 20 bp, Artificial Sequence
  Synthetic: descartes_6636_TNFSF13
gcccttgcccggggaattat

SEQ ID NO: 10724 - DNA, 20 bp, Artificial Sequence
  Synthetic: descartes_6637_TNFSF13
cgggatctctccccattctc

SEQ ID NO: 10725 - DNA, 20 bp, Artificial Sequence
  Synthetic: descartes_6638_TNFSF13
caccaaggggatattctgag

SEQ ID NO: 10726 - DNA, 20 bp, Artificial Sequence
  Synthetic: descartes_6639_TNFSF13
accatgggtcaggtggtgtc

SEQ ID NO: 10727 - DNA, 20 bp, Artificial Sequence
  Synthetic: descartes_6640_TNFSF13
ggggctagcaagaaaggaga

SEQ ID NO: 10728 - DNA, 20 bp, Artificial Sequence
  Synthetic: descartes_6641_TNFSF13
aagacgtgactttcaccatg

SEQ ID NO: 10729 - DNA, 20 bp, Artificial Sequence
  Synthetic: descartes_6642_TNFSF13B
aatgcaccaaaaaatgtgac

SEQ ID NO: 10730 - DNA, 20 bp, Artificial Sequence
  Synthetic: descartes_6643_TNFSF13B
actgtctgcaatcagttgca

SEQ ID NO: 10731 - DNA, 20 bp, Artificial Sequence
  Synthetic: descartes_6644_TNFSF13B
aaaggggaagtgccctagaa

SEQ ID NO: 10732 - DNA, 20 bp, Artificial Sequence
  Synthetic: descartes_6645_TNFSF13B
gatgtattcaaaatatgcct

SEQ ID NO: 10733 - DNA, 20 bp, Artificial Sequence
  Synthetic: descartes_6646_TNFSF13B
aagctgagaagccatggaac

SEQ ID NO: 10734 - DNA, 20 bp, Artificial Sequence
  Synthetic: descartes_6647_TNFSF13B
aatacatcgaaacaaagtca

SEQ ID NO: 10735 - DNA, 20 bp, Artificial Sequence
  Synthetic: descartes_6648_TNFSF13B
tatactgataagacctacgc

SEQ ID NO: 10736 - DNA, 20 bp, Artificial Sequence
  Synthetic: descartes_6649_TNFSF13B
catcctcccacggaaggaaa

SEQ ID NO: 10737 - DNA, 20 bp, Artificial Sequence
  Synthetic: descartes_6650_TNFSF18
ctagcaaatccccaattcat

SEQ ID NO: 10738 - DNA, 20 bp, Artificial Sequence
  Synthetic: descartes_6651_TNFSF18
gaacctgatgctcagagttg

SEQ ID NO: 10739 - DNA, 20 bp, Artificial Sequence
  Synthetic: descartes_6652_TNFSF18
gagaaatgagagctgtggaa

SEQ ID NO: 10740 - DNA, 20 bp, Artificial Sequence
  Synthetic: descartes_6653_TNFSF18
aggtgcggctgtataaaaac

SEQ ID NO: 10741 - DNA, 20 bp, Artificial Sequence
  Synthetic: descartes_6654_TNFSF18
ctagtaaaatgataccccag

SEQ ID NO: 10742 - DNA, 20 bp, Artificial Sequence
  Synthetic: descartes_6655_TNFSF18
caagtggctcaaacacattt

SEQ ID NO: 10743 - DNA, 20 bp, Artificial Sequence
  Synthetic: descartes_6656_TNFSF18
cattgggagccacttggcca

SEQ ID NO: 10744 - DNA, 20 bp, Artificial Sequence
  Synthetic: descartes_6657_TNFSF18
tacagccgcacctcaaaagg

SEQ ID NO: 10745 - DNA, 20 bp, Artificial Sequence
  Synthetic: descartes_6658_TNFSF4
atggataagaatcagttctc

SEQ ID NO: 10746 - DNA, 20 bp, Artificial Sequence
  Synthetic: descartes_6659_TNFSF4
ggaagtgaggatgaaacctt

SEQ ID NO: 10747 - DNA, 20 bp, Artificial Sequence
  Synthetic: descartes_6660_TNFSF4
atcctcacttcccaaaagga

SEQ ID NO: 10748 - DNA, 20 bp, Artificial Sequence
  Synthetic: descartes_6661_TNFSF4
tctcatctccctgaagggct

SEQ ID NO: 10749 - DNA, 20 bp, Artificial Sequence
  Synthetic: descartes_6662_TNFSF4
ccacattctcttccaggggt

SEQ ID NO: 10750 - DNA, 20 bp, Artificial Sequence
  Synthetic: descartes_6663_TNFSF4
aattcgaggataccgatgtg

SEQ ID NO: 10751 - DNA, 20 bp, Artificial Sequence
  Synthetic: descartes_6664_TNFSF4
taagtcagagaggccaccat

SEQ ID NO: 10752 - DNA, 20 bp, Artificial Sequence
  Synthetic: descartes_6665_TNFSF4
atcctccttttgggaagtga

SEQ ID NO: 10753 - DNA, 20 bp, Artificial Sequence
  Synthetic: descartes_6666_TNFSF9
acttgcgctgcacctgcagc

SEQ ID NO: 10754 - DNA, 20 bp, Artificial Sequence
  Synthetic: descartes_6667_TNFSF9
ggccaccagctgcgcaaaca

SEQ ID NO: 10755 - DNA, 20 bp, Artificial Sequence
  Synthetic: descartes_6668_TNFSF9
gggggtcacccggaagagtc

SEQ ID NO: 10756 - DNA, 20 bp, Artificial Sequence
  Synthetic: descartes_6669_TNFSF9
cagggccgcttgctgcacct

SEQ ID NO: 10757 - DNA, 20 bp, Artificial Sequence
  Synthetic: descartes_6670_TNFSF9
accgtggacctgccacccgc

SEQ ID NO: 10758 - DNA, 20 bp, Artificial Sequence
  Synthetic: descartes_6671_TNFSF9
gcccgacgatcccgccggcc

SEQ ID NO: 10759 - DNA, 20 bp, Artificial Sequence
  Synthetic: descartes_6672_TNFSF9
aactagagctgcggcgcgtg

SEQ ID NO: 10760 - DNA, 20 bp, Artificial Sequence
  Synthetic: descartes_6673_TNFSF9
tagctcaggccccccgtcag

SEQ ID NO: 10761 - DNA, 20 bp, Artificial Sequence
  Synthetic: descartes_6674_TP53BP1
aatgctgtagtacagttccc

SEQ ID NO: 10762 - DNA, 20 bp, Artificial Sequence
  Synthetic: descartes_6675_TP53BP1
gtgagagcagatgatccttt

SEQ ID NO: 10763 - DNA, 20 bp, Artificial Sequence
  Synthetic: descartes_6676_TP53BP1
gctgaggtaactgctcaatg

SEQ ID NO: 10764 - DNA, 20 bp, Artificial Sequence
  Synthetic: descartes_6677_TP53BP1
cctgagagaactcccatgga

SEQ ID NO: 10765 - DNA, 20 bp, Artificial Sequence
  Synthetic: descartes_6678_TP53BP1
gccccaaagcatctgttgct

SEQ ID NO: 10766 - DNA, 20 bp, Artificial Sequence
  Synthetic: descartes_6679_TP53BP1
aggggaatcaatactaatca

SEQ ID NO: 10767 - DNA, 20 bp, Artificial Sequence
  Synthetic: descartes_6680_TP53BP1
agcagcaacccagactataa

SEQ ID NO: 10768 - DNA, 20 bp, Artificial Sequence
  Synthetic: descartes_6681_TP53BP1
ccttacccagctcccgagga

SEQ ID NO: 10769 - DNA, 20 bp, Artificial Sequence
  Synthetic: descartes_6682_TRAF2
cctccagcaccgagctcagt

SEQ ID NO: 10770 - DNA, 20 bp, Artificial Sequence
  Synthetic: descartes_6683_TRAF2
agaggccagtcaacgacatg

SEQ ID NO: 10771 - DNA, 20 bp, Artificial Sequence
  Synthetic: descartes_6684_TRAF2
accaaggcggaccaggcctt

SEQ ID NO: 10772 - DNA, 20 bp, Artificial Sequence
  Synthetic: descartes_6685_TRAF2
aggaccacgtcaagacttgt

SEQ ID NO: 10773 - DNA, 20 bp, Artificial Sequence
  Synthetic: descartes_6686_TRAF2
agggtccccttccaggtgca

SEQ ID NO: 10774 - DNA, 20 bp, Artificial Sequence
  Synthetic: descartes_6687_TRAF2
tgcaggcggagcacaggtac

SEQ ID NO: 10775 - DNA, 20 bp, Artificial Sequence
  Synthetic: descartes_6688_TRAF2
agaacattgtctgcgtcctg

SEQ ID NO: 10776 - DNA, 20 bp, Artificial Sequence
  Synthetic: descartes_6689_TRAF2
taaaatagaaatgccttctt

SEQ ID NO: 10777 - DNA, 20 bp, Artificial Sequence
  Synthetic: descartes_6690_TRAF6
atggcaaccaaaagtactga

SEQ ID NO: 10778 - DNA, 20 bp, Artificial Sequence
  Synthetic: descartes_6691_TRAF6
caggaaactattcaccagtt

SEQ ID NO: 10779 - DNA, 20 bp, Artificial Sequence
  Synthetic: descartes_6692_TRAF6
gaagggacgctggcattggg

SEQ ID NO: 10780 - DNA, 20 bp, Artificial Sequence
  Synthetic: descartes_6693_TRAF6
accatcagagaaagaatctc

SEQ ID NO: 10781 - DNA, 20 bp, Artificial Sequence
  Synthetic: descartes_6694_TRAF6
agctcacttacatacatact

SEQ ID NO: 10782 - DNA, 20 bp, Artificial Sequence
  Synthetic: descartes_6695_TRAF6
tccacacaatgcaaggagaa

SEQ ID NO: 10783 - DNA, 20 bp, Artificial Sequence
  Synthetic: descartes_6696_TRAF6
ccagtgtagaatccagggct

SEQ ID NO: 10784 - DNA, 20 bp, Artificial Sequence
  Synthetic: descartes_6697_TRAF6
acccacccctggaaagcaag

SEQ ID NO: 10785 - DNA, 20 bp, Artificial Sequence
  Synthetic: descartes_6698_TRAT1
gttatatcactgatcttcaa

SEQ ID NO: 10786 - DNA, 20 bp, Artificial Sequence
  Synthetic: descartes_6699_TRAT1
tccccagaaagccaggcagt

SEQ ID NO: 10787 - DNA, 20 bp, Artificial Sequence
  Synthetic: descartes_6700_TRAT1
ccactatgtggaaaagcaac

SEQ ID NO: 10788 - DNA, 20 bp, Artificial Sequence
  Synthetic: descartes_6701_TRAT1
tggggagaaactgtctacta

SEQ ID NO: 10789 - DNA, 20 bp, Artificial Sequence
  Synthetic: descartes_6702_TRAT1
ctctggggacttctagcatt

SEQ ID NO: 10790 - DNA, 20 bp, Artificial Sequence
  Synthetic: descartes_6703_TRAT1
gattgatccgtgctaagaga

SEQ ID NO: 10791 - DNA, 20 bp, Artificial Sequence
  Synthetic: descartes_6704_TRAT1
taagaccaccttagtagaca

SEQ ID NO: 10792 - DNA, 20 bp, Artificial Sequence
  Synthetic: descartes_6705_TRAT1
tggtaacttagatgatatga

SEQ ID NO: 10793 - DNA, 20 bp, Artificial Sequence
  Synthetic: descartes_6706_TRIM24
gtgattagtgtatctatgat

SEQ ID NO: 10794 - DNA, 20 bp, Artificial Sequence
  Synthetic: descartes_6707_TRIM24
tctataggtgttaacttaac

SEQ ID NO: 10795 - DNA, 20 bp, Artificial Sequence
  Synthetic: descartes_6708_TRIM24
gtgatgattcagatgatgac

SEQ ID NO: 10796 - DNA, 20 bp, Artificial Sequence
  Synthetic: descartes_6709_TRIM24
cagtggcagcagtacagcat

SEQ ID NO: 10797 - DNA, 20 bp, Artificial Sequence
  Synthetic: descartes_6710_TRIM24
cactgatggtagaaataaat

SEQ ID NO: 10798 - DNA, 20 bp, Artificial Sequence
  Synthetic: descartes_6711_TRIM24
atggcagtaaagaaataaaa

SEQ ID NO: 10799 - DNA, 20 bp, Artificial Sequence
  Synthetic: descartes_6712_TRIM24
cctgttgttatagtgaagca

SEQ ID NO: 10800 - DNA, 20 bp, Artificial Sequence
  Synthetic: descartes_6713_TRIM24
agcccagaaactaggatcac

SEQ ID NO: 10801 - DNA, 20 bp, Artificial Sequence
  Synthetic: descartes_6714_TRIM27
cctcccgagtaactcagact

SEQ ID NO: 10802 - DNA, 20 bp, Artificial Sequence
  Synthetic: descartes_6715_TRIM27
cctgtgtcttgggctctcca

SEQ ID NO: 10803 - DNA, 20 bp, Artificial Sequence
  Synthetic: descartes_6716_TRIM27
tctcccacctctacctccca

SEQ ID NO: 10804 - DNA, 20 bp, Artificial Sequence
  Synthetic: descartes_6717_TRIM27
gactctccgtcaagaataga

SEQ ID NO: 10805 - DNA, 20 bp, Artificial Sequence
  Synthetic: descartes_6718_TRIM27
aatggtcgagctggttctgg

SEQ ID NO: 10806 - DNA, 20 bp, Artificial Sequence
  Synthetic: descartes_6719_TRIM27
ccataccacaaagacactgc

SEQ ID NO: 10807 - DNA, 20 bp, Artificial Sequence
  Synthetic: descartes_6720_TRIM27
ggagtttgagcagctgtatc

SEQ ID NO: 10808 - DNA, 20 bp, Artificial Sequence
  Synthetic: descartes_6721_TRIM27
tgcacactgagtcttcacag

SEQ ID NO: 10809 - DNA, 20 bp, Artificial Sequence
  Synthetic: descartes_6722_TRIM28
agtgggacctcaatgcctgg

SEQ ID NO: 10810 - DNA, 20 bp, Artificial Sequence
  Synthetic: descartes_6723_TRIM28
gtctcagggccctcagtggc

SEQ ID NO: 10811 - DNA, 20 bp, Artificial Sequence
  Synthetic: descartes_6724_TRIM28
acacctgacacatggggctc

SEQ ID NO: 10812 - DNA, 20 bp, Artificial Sequence
  Synthetic: descartes_6725_TRIM28
tgagagctgtgatactctca

SEQ ID NO: 10813 - DNA, 20 bp, Artificial Sequence
  Synthetic: descartes_6726_TRIM28
cacctggactgtcacctgcc

SEQ ID NO: 10814 - DNA, 20 bp, Artificial Sequence
  Synthetic: descartes_6727_TRIM28
gagaagcactgttgcttgca

SEQ ID NO: 10815 - DNA, 20 bp, Artificial Sequence
  Synthetic: descartes_6728_TRIM28
tttccacctggactgtcacc

SEQ ID NO: 10816 - DNA, 20 bp, Artificial Sequence
  Synthetic: descartes_6729_TRIM28
atgcgtgatagtggcagcaa

SEQ ID NO: 10817 - DNA, 20 bp, Artificial Sequence
  Synthetic: descartes_6730_TRIM33
gcagcacaagagatctcctc

SEQ ID NO: 10818 - DNA, 20 bp, Artificial Sequence
  Synthetic: descartes_6731_TRIM33
gcagacagcacaccagtctt

SEQ ID NO: 10819 - DNA, 20 bp, Artificial Sequence
  Synthetic: descartes_6732_TRIM33
gataatctactaagtagata

SEQ ID NO: 10820 - DNA, 20 bp, Artificial Sequence
  Synthetic: descartes_6733_TRIM33
cctgcctgagctacttctga

SEQ ID NO: 10821 - DNA, 20 bp, Artificial Sequence
  Synthetic: descartes_6734_TRIM33
tgccctgtacacaaacaaga

SEQ ID NO: 10822 - DNA, 20 bp, Artificial Sequence
  Synthetic: descartes_6735_TRIM33
atcagaactgctaggagctt

SEQ ID NO: 10823 - DNA, 20 bp, Artificial Sequence
  Synthetic: descartes_6736_TRIM33
acccttatcaatgaaattaa

SEQ ID NO: 10824 - DNA, 20 bp, Artificial Sequence
  Synthetic: descartes_6737_TRIM33
tcttcaaagtacaatgcaac

SEQ ID NO: 10825 - DNA, 20 bp, Artificial Sequence
  Synthetic: descartes_6738_TRIM47
gacagcgacacagcagacaa

SEQ ID NO: 10826 - DNA, 20 bp, Artificial Sequence
  Synthetic: descartes_6739_TRIM47
gttccaaacagctgcaggaa

SEQ ID NO: 10827 - DNA, 20 bp, Artificial Sequence
  Synthetic: descartes_6740_TRIM47
gaaccaaaggtgtcaagagg

SEQ ID NO: 10828 - DNA, 20 bp, Artificial Sequence
  Synthetic: descartes_6741_TRIM47
gtgaagctgagctccctcgg

SEQ ID NO: 10829 - DNA, 20 bp, Artificial Sequence
  Synthetic: descartes_6742_TRIM47
atgggctggaggctcccctg

SEQ ID NO: 10830 - DNA, 20 bp, Artificial Sequence
  Synthetic: descartes_6743_TRIM47
ccccgcgcacctgggcccgc

SEQ ID NO: 10831 - DNA, 20 bp, Artificial Sequence
  Synthetic: descartes_6744_TRIM47
cggggctcttcacccacaga

SEQ ID NO: 10832 - DNA, 20 bp, Artificial Sequence
  Synthetic: descartes_6745_TRIM47
cagatgctgcggccgccctg

SEQ ID NO: 10833 - DNA, 20 bp, Artificial Sequence
  Synthetic: descartes_6746_TRPM4
ccctggactacaactactcg

SEQ ID NO: 10834 - DNA, 20 bp, Artificial Sequence
  Synthetic: descartes_6747_TRPM4
ccctccactcatctacaccc

SEQ ID NO: 10835 - DNA, 20 bp, Artificial Sequence
  Synthetic: descartes_6748_TRPM4
acatggatagtgtcattaat

SEQ ID NO: 10836 - DNA, 20 bp, Artificial Sequence
  Synthetic: descartes_6749_TRPM4
gctgtggcttggaaccgcgt

SEQ ID NO: 10837 - DNA, 20 bp, Artificial Sequence
  Synthetic: descartes_6750_TRPM4
acggtgcggctgcttcacat

SEQ ID NO: 10838 - DNA, 20 bp, Artificial Sequence
  Synthetic: descartes_6751_TRPM4
tagtctggtcacacgcacat

SEQ ID NO: 10839 - DNA, 20 bp, Artificial Sequence
  Synthetic: descartes_6752_TRPM4
cctttctaaggaagccgagc

SEQ ID NO: 10840 - DNA, 20 bp, Artificial Sequence
  Synthetic: descartes_6753_TRPM4
taaggaagccgagcggaagc

SEQ ID NO: 10841 - DNA, 20 bp, Artificial Sequence
  Synthetic: descartes_6754_TSC1
gtgagacacagaatagccat

SEQ ID NO: 10842 - DNA, 20 bp, Artificial Sequence
  Synthetic: descartes_6755_TSC1
actcccccaggccacagtca

SEQ ID NO: 10843 - DNA, 20 bp, Artificial Sequence
  Synthetic: descartes_6756_TSC1
ccgagacagtctcccaggtt

SEQ ID NO: 10844 - DNA, 20 bp, Artificial Sequence
  Synthetic: descartes_6757_TSC1
ggtgatctggcctctgaaga

SEQ ID NO: 10845 - DNA, 20 bp, Artificial Sequence
  Synthetic: descartes_6758_TSC1
caaggactgggagtgaagat

SEQ ID NO: 10846 - DNA, 20 bp, Artificial Sequence
  Synthetic: descartes_6759_TSC1
ggaggtatcaagcctctgag

SEQ ID NO: 10847 - DNA, 20 bp, Artificial Sequence
  Synthetic: descartes_6760_TSC1
gcacactcgatcacaacatc

SEQ ID NO: 10848 - DNA, 20 bp, Artificial Sequence
  Synthetic: descartes_6761_TSC1
agaggcagcagcatgccctc

SEQ ID NO: 10849 - DNA, 20 bp, Artificial Sequence
  Synthetic: descartes_6762_TWSG1
gatgctcccatggactcaca

SEQ ID NO: 10850 - DNA, 20 bp, Artificial Sequence
  Synthetic: descartes_6763_TWSG1
ctaccatagtcaatacattc

SEQ ID NO: 10851 - DNA, 20 bp, Artificial Sequence
  Synthetic: descartes_6764_TWSG1
cactgatgtatggacatgca

SEQ ID NO: 10852 - DNA, 20 bp, Artificial Sequence
  Synthetic: descartes_6765_TWSG1
atgactgcatgtccatacat

SEQ ID NO: 10853 - DNA, 20 bp, Artificial Sequence
  Synthetic: descartes_6766_TWSG1
cctgttgcagaagaactttc

SEQ ID NO: 10854 - DNA, 20 bp, Artificial Sequence
  Synthetic: descartes_6767_TWSG1
ataatgcctgctgcgagtgc

SEQ ID NO: 10855 - DNA, 20 bp, Artificial Sequence
  Synthetic: descartes_6768_TWSG1
gaaactgtgaaccagccaca

SEQ ID NO: 10856 - DNA, 20 bp, Artificial Sequence
  Synthetic: descartes_6769_TWSG1
acatcatgagaatctggttt

SEQ ID NO: 10857 - DNA, 20 bp, Artificial Sequence
  Synthetic: descartes_6770_TXK
catgaactctgtcacaatgt

SEQ ID NO: 10858 - DNA, 20 bp, Artificial Sequence
  Synthetic: descartes_6771_TXK
gccttaaggagagcagaaga

SEQ ID NO: 10859 - DNA, 20 bp, Artificial Sequence
  Synthetic: descartes_6772_TXK
attgaagaggccaaagtgat

SEQ ID NO: 10860 - DNA, 20 bp, Artificial Sequence
  Synthetic: descartes_6773_TXK
tgcccagagaaccctgtaat

SEQ ID NO: 10861 - DNA, 20 bp, Artificial Sequence
  Synthetic: descartes_6774_TXK
gatgatgagtatgtcagttc

SEQ ID NO: 10862 - DNA, 20 bp, Artificial Sequence
  Synthetic: descartes_6775_TXK
ctatgcatgttgaactgacc

SEQ ID NO: 10863 - DNA, 20 bp, Artificial Sequence
  Synthetic: descartes_6776_TXK
ggtgaatggcggtcacatat

SEQ ID NO: 10864 - DNA, 20 bp, Artificial Sequence
  Synthetic: descartes_6777_TXK
aataagtacagcagtaaatc

SEQ ID NO: 10865 - DNA, 20 bp, Artificial Sequence
  Synthetic: descartes_6778_UBASH3A
actggaggaactggatctca

SEQ ID NO: 10866 - DNA, 20 bp, Artificial Sequence
  Synthetic: descartes_6779_UBASH3A
actagagcctccttcgtgag

SEQ ID NO: 10867 - DNA, 20 bp, Artificial Sequence
  Synthetic: descartes_6780_UBASH3A
ccctgcagtctgccaagacg

SEQ ID NO: 10868 - DNA, 20 bp, Artificial Sequence
  Synthetic: descartes_6781_UBASH3A
aaggatgtagtggctcacga

SEQ ID NO: 10869 - DNA, 20 bp, Artificial Sequence
  Synthetic: descartes_6782_UBASH3A
cctccccagccctccgctgt

SEQ ID NO: 10870 - DNA, 20 bp, Artificial Sequence
  Synthetic: descartes_6783_UBASH3A
gccgtctgcacacagcggag

SEQ ID NO: 10871 - DNA, 20 bp, Artificial Sequence
  Synthetic: descartes_6784_UBASH3A
ttcacagaagcacatgccca

SEQ ID NO: 10872 - DNA, 20 bp, Artificial Sequence
  Synthetic: descartes_6785_UBASH3A
ccctgtccgccctcatgccg

SEQ ID NO: 10873 - DNA, 20 bp, Artificial Sequence
  Synthetic: descartes_6786_UBE2N
aaagtccctccctcaaaggg

SEQ ID NO: 10874 - DNA, 20 bp, Artificial Sequence
  Synthetic: descartes_6787_UBE2N
ctggcagaaccagttcctgg

SEQ ID NO: 10875 - DNA, 20 bp, Artificial Sequence
  Synthetic: descartes_6788_UBE2N
ggggctgccattgggtattc

SEQ ID NO: 10876 - DNA, 20 bp, Artificial Sequence
  Synthetic: descartes_6789_UBE2N
atgaccaaaatttatcatcc

SEQ ID NO: 10877 - DNA, 20 bp, Artificial Sequence
  Synthetic: descartes_6790_UBE2N
aacttgaactattccttcca

SEQ ID NO: 10878 - DNA, 20 bp, Artificial Sequence
  Synthetic: descartes_6791_UBE2N
gtcatgaaacgtactttagg

SEQ ID NO: 10879 - DNA, 20 bp, Artificial Sequence
  Synthetic: descartes_6792_UBE2N
atgtggtcattgctggccct

SEQ ID NO: 10880 - DNA, 20 bp, Artificial Sequence
  Synthetic: descartes_6793_UBE2N
tcatcctaatgtagacaagt

SEQ ID NO: 10881 - DNA, 20 bp, Artificial Sequence
  Synthetic: descartes_6794_UBR7
actgaaactcttcaaagaac

SEQ ID NO: 10882 - DNA, 20 bp, Artificial Sequence
  Synthetic: descartes_6795_UBR7
gttgtgattgtggaaacagc

SEQ ID NO: 10883 - DNA, 20 bp, Artificial Sequence
  Synthetic: descartes_6796_UBR7
atgcaggcctggcataccat

SEQ ID NO: 10884 - DNA, 20 bp, Artificial Sequence
  Synthetic: descartes_6797_UBR7
gcttgcagttatgaatgtca

SEQ ID NO: 10885 - DNA, 20 bp, Artificial Sequence
  Synthetic: descartes_6798_UBR7
ataagccagaactgtgtcgt

SEQ ID NO: 10886 - DNA, 20 bp, Artificial Sequence
  Synthetic: descartes_6799_UBR7
tgtatagctcaaatagtttg

SEQ ID NO: 10887 - DNA, 20 bp, Artificial Sequence
  Synthetic: descartes_6800_UBR7
agtcaaaaaagagaagaaga

SEQ ID NO: 10888 - DNA, 20 bp, Artificial Sequence
  Synthetic: descartes_6801_UBR7
aggagatggtatgccaggcc

SEQ ID NO: 10889 - DNA, 20 bp, Artificial Sequence
  Synthetic: descartes_6802_UHRF1
tgatcacaagactgttccgc

SEQ ID NO: 10890 - DNA, 20 bp, Artificial Sequence
  Synthetic: descartes_6803_UHRF1
ctgtccctcccctcagcgcc

SEQ ID NO: 10891 - DNA, 20 bp, Artificial Sequence
  Synthetic: descartes_6804_UHRF1
cccctgtagaacagcctctg

SEQ ID NO: 10892 - DNA, 20 bp, Artificial Sequence
  Synthetic: descartes_6805_UHRF1
acgtggtaaatgacgtcctc

SEQ ID NO: 10893 - DNA, 20 bp, Artificial Sequence
  Synthetic: descartes_6806_UHRF1
acatacacgggtagtggtgg

SEQ ID NO: 10894 - DNA, 20 bp, Artificial Sequence
  Synthetic: descartes_6807_UHRF1
ctcccatcaatgaccaagaa

SEQ ID NO: 10895 - DNA, 20 bp, Artificial Sequence
  Synthetic: descartes_6808_UHRF1
tcgtgtggcgctaccttctg

SEQ ID NO: 10896 - DNA, 20 bp, Artificial Sequence
  Synthetic: descartes_6809_UHRF1
cggcaacaagaggaccgcgg

SEQ ID NO: 10897 - DNA, 20 bp, Artificial Sequence
  Synthetic: descartes_6810_UHRF2
aagggaggaagatcagcaaa

SEQ ID NO: 10898 - DNA, 20 bp, Artificial Sequence
  Synthetic: descartes_6811_UHRF2
ccacgtgactgtccatcaga

SEQ ID NO: 10899 - DNA, 20 bp, Artificial Sequence
  Synthetic: descartes_6812_UHRF2
ccaccacatacacgacagga

SEQ ID NO: 10900 - DNA, 20 bp, Artificial Sequence
  Synthetic: descartes_6813_UHRF2
agaagagatgatgttgaacc

SEQ ID NO: 10901 - DNA, 20 bp, Artificial Sequence
  Synthetic: descartes_6814_UHRF2
gcctcaatctgtgtagatgt

SEQ ID NO: 10902 - DNA, 20 bp, Artificial Sequence
  Synthetic: descartes_6815_UHRF2
aactaactcctcaacagcaa

SEQ ID NO: 10903 - DNA, 20 bp, Artificial Sequence
  Synthetic: descartes_6816_UHRF2
ctgtcaggagctagtttacc

SEQ ID NO: 10904 - DNA, 20 bp, Artificial Sequence
  Synthetic: descartes_6817_UHRF2
ccaccgcttccagtgtatgt

SEQ ID NO: 10905 - DNA, 20 bp, Artificial Sequence
  Synthetic: descartes_6818_ULBP1
actgggggattgtaagatgt

SEQ ID NO: 10906 - DNA, 20 bp, Artificial Sequence
  Synthetic: descartes_6819_ULBP1
atgtactgggaacaaatgct

SEQ ID NO: 10907 - DNA, 20 bp, Artificial Sequence
  Synthetic: descartes_6820_ULBP1
cttaaagggcaactgcttga

SEQ ID NO: 10908 - DNA, 20 bp, Artificial Sequence
  Synthetic: descartes_6821_ULBP1
agtcaaagaggaggaacttc

SEQ ID NO: 10909 - DNA, 20 bp, Artificial Sequence
  Synthetic: descartes_6822_ULBP1
gccttgtggttaacacagtc

SEQ ID NO: 10910 - DNA, 20 bp, Artificial Sequence
  Synthetic: descartes_6823_ULBP1
ctatgacttcatcatcactc

SEQ ID NO: 10911 - DNA, 20 bp, Artificial Sequence
  Synthetic: descartes_6824_ULBP1
aggaaatccaccacgtctct

SEQ ID NO: 10912 - DNA, 20 bp, Artificial Sequence
  Synthetic: descartes_6825_ULBP1
ttcccagtacatcaaaaatt

SEQ ID NO: 10913 - DNA, 20 bp, Artificial Sequence
  Synthetic: descartes_6826_ULBP2
gatgggcagatcttcctcct

SEQ ID NO: 10914 - DNA, 20 bp, Artificial Sequence
  Synthetic: descartes_6827_ULBP2
ctatgacatcaccgtcatcc

SEQ ID NO: 10915 - DNA, 20 bp, Artificial Sequence
  Synthetic: descartes_6828_ULBP2
tgctcacaagacatccttgc

SEQ ID NO: 10916 - DNA, 20 bp, Artificial Sequence
  Synthetic: descartes_6829_ULBP2
actcagagaagagaatgtgg

SEQ ID NO: 10917 - DNA, 20 bp, Artificial Sequence
  Synthetic: descartes_6830_ULBP2
atccacctggccttgaaccg

SEQ ID NO: 10918 - DNA, 20 bp, Artificial Sequence
  Synthetic: descartes_6831_ULBP2
ctgcctcctcatcatcctcc

SEQ ID NO: 10919 - DNA, 20 bp, Artificial Sequence
  Synthetic: descartes_6832_ULBP2
ttcactatgactgtggcaac

SEQ ID NO: 10920 - DNA, 20 bp, Artificial Sequence
  Synthetic: descartes_6833_ULBP2
gtttcttccccaggggactg

SEQ ID NO: 10921 - DNA, 20 bp, Artificial Sequence
  Synthetic: descartes_6834_ULBP3
cccaggcatctgtggcatac

SEQ ID NO: 10922 - DNA, 20 bp, Artificial Sequence
  Synthetic: descartes_6835_ULBP3
agtcaaagaggaggaacttc

SEQ ID NO: 10923 - DNA, 20 bp, Artificial Sequence
  Synthetic: descartes_6836_ULBP3
tctcctatgactgtggcagt

SEQ ID NO: 10924 - DNA, 20 bp, Artificial Sequence
  Synthetic: descartes_6837_ULBP3
cccagacatgggcaacagtg

SEQ ID NO: 10925 - DNA, 20 bp, Artificial Sequence
  Synthetic: descartes_6838_ULBP3
actcaaacaacagaaagtgg

SEQ ID NO: 10926 - DNA, 20 bp, Artificial Sequence
  Synthetic: descartes_6839_ULBP3
ggttgagctaagcctggggc

SEQ ID NO: 10927 - DNA, 20 bp, Artificial Sequence
  Synthetic: descartes_6840_ULBP3
atccgcctggctccagcgtg

SEQ ID NO: 10928 - DNA, 20 bp, Artificial Sequence
  Synthetic: descartes_6841_ULBP3
tgttgtttgagtcaaagagg

SEQ ID NO: 10929 - DNA, 20 bp, Artificial Sequence
  Synthetic: descartes_6842_UNC13D
actgttgccttcagacaaaa

SEQ ID NO: 10930 - DNA, 20 bp, Artificial Sequence
  Synthetic: descartes_6843_UNC13D
tctgaaggcaacagtgaaac

SEQ ID NO: 10931 - DNA, 20 bp, Artificial Sequence
  Synthetic: descartes_6844_UNC13D
aggacatcaccaatgcgagc

SEQ ID NO: 10932 - DNA, 20 bp, Artificial Sequence
  Synthetic: descartes_6845_UNC13D
cccagatcagccacactgcc

SEQ ID NO: 10933 - DNA, 20 bp, Artificial Sequence
  Synthetic: descartes_6846_UNC13D
tggatgtgcttggcgatgcc

SEQ ID NO: 10934 - DNA, 20 bp, Artificial Sequence
  Synthetic: descartes_6847_UNC13D
gggcgggggatcctgtagat

SEQ ID NO: 10935 - DNA, 20 bp, Artificial Sequence
  Synthetic: descartes_6848_UNC13D
aagaggcccggaaggacaaa

SEQ ID NO: 10936 - DNA, 20 bp, Artificial Sequence
  Synthetic: descartes_6849_UNC13D
ctacatgaacaccaacttgg

SEQ ID NO: 10937 - DNA, 20 bp, Artificial Sequence
  Synthetic: descartes_6850_UNC93B1
gaacgaagtggatgatgttc

SEQ ID NO: 10938 - DNA, 20 bp, Artificial Sequence
  Synthetic: descartes_6851_UNC93B1
ctgaaccactacctgtatga

SEQ ID NO: 10939 - DNA, 20 bp, Artificial Sequence
  Synthetic: descartes_6852_UNC93B1
tgcggagccgcttaccggcc

SEQ ID NO: 10940 - DNA, 20 bp, Artificial Sequence
  Synthetic: descartes_6853_UNC93B1
ggcttccatgggcaactaca

SEQ ID NO: 10941 - DNA, 20 bp, Artificial Sequence
  Synthetic: descartes_6854_UNC93B1
gggtgtgggcagtgccctga

SEQ ID NO: 10942 - DNA, 20 bp, Artificial Sequence
  Synthetic: descartes_6855_UNC93B1
cgctccgcgggagcgtccgc

SEQ ID NO: 10943 - DNA, 20 bp, Artificial Sequence
  Synthetic: descartes_6856_UNC93B1
tctccaccaactactgggag

SEQ ID NO: 10944 - DNA, 20 bp, Artificial Sequence
  Synthetic: descartes_6857_UNC93B1
ctgtcgatgtcgggcagccc

SEQ ID NO: 10945 - DNA, 20 bp, Artificial Sequence
  Synthetic: descartes_6858_UNG
gccaggacacaactgcatca

SEQ ID NO: 10946 - DNA, 20 bp, Artificial Sequence
  Synthetic: descartes_6859_UNG
gagagagctggaagaagcac

SEQ ID NO: 10947 - DNA, 20 bp, Artificial Sequence
  Synthetic: descartes_6860_UNG
tccacccccacaccaagtct

SEQ ID NO: 10948 - DNA, 20 bp, Artificial Sequence
  Synthetic: descartes_6861_UNG
aaagaccaatgagctgctgc

SEQ ID NO: 10949 - DNA, 20 bp, Artificial Sequence
  Synthetic: descartes_6862_UNG
ccgaactccccgctgaggtg

SEQ ID NO: 10950 - DNA, 20 bp, Artificial Sequence
  Synthetic: descartes_6863_UNG
taaagagttgtctacagaca

SEQ ID NO: 10951 - DNA, 20 bp, Artificial Sequence
  Synthetic: descartes_6864_UNG
tcccccagccccgccaggaa

SEQ ID NO: 10952 - DNA, 20 bp, Artificial Sequence
  Synthetic: descartes_6865_UNG
ctcaggcaccccagccacgc

SEQ ID NO: 10953 - DNA, 20 bp, Artificial Sequence
  Synthetic: descartes_6866_USB1
agaggtggacagagtcatgg

SEQ ID NO: 10954 - DNA, 20 bp, Artificial Sequence
  Synthetic: descartes_6867_USB1
ggagctctgcgtcaggagcc

SEQ ID NO: 10955 - DNA, 20 bp, Artificial Sequence
  Synthetic: descartes_6868_USB1
ctgccaaccaggtaaagatt

SEQ ID NO: 10956 - DNA, 20 bp, Artificial Sequence
  Synthetic: descartes_6869_USB1
cagtacctgacagtgtgctg

SEQ ID NO: 10957 - DNA, 20 bp, Artificial Sequence
  Synthetic: descartes_6870_USB1
ctgggtgacaggggcatctt

SEQ ID NO: 10958 - DNA, 20 bp, Artificial Sequence
  Synthetic: descartes_6871_USB1
tcttgattggtgtaaatctt

SEQ ID NO: 10959 - DNA, 20 bp, Artificial Sequence
  Synthetic: descartes_6872_USB1
cctggttggcagtaaagaag

SEQ ID NO: 10960 - DNA, 20 bp, Artificial Sequence
  Synthetic: descartes_6873_USB1
tgctgtcatcttcaggcccc

SEQ ID NO: 10961 - DNA, 20 bp, Artificial Sequence
  Synthetic: descartes_6874_USP49
gctcaggacactacacagcc

SEQ ID NO: 10962 - DNA, 20 bp, Artificial Sequence
  Synthetic: descartes_6875_USP49
ggtccactgcaatgactcaa

SEQ ID NO: 10963 - DNA, 20 bp, Artificial Sequence
  Synthetic: descartes_6876_USP49
ggacctatccctggaattcc

SEQ ID NO: 10964 - DNA, 20 bp, Artificial Sequence
  Synthetic: descartes_6877_USP49
cgtgtcccccaccccacaga

SEQ ID NO: 10965 - DNA, 20 bp, Artificial Sequence
  Synthetic: descartes_6878_USP49
cctctgccgtgaactgcaca

SEQ ID NO: 10966 - DNA, 20 bp, Artificial Sequence
  Synthetic: descartes_6879_USP49
gaagggtcaaggttgaggaa

SEQ ID NO: 10967 - DNA, 20 bp, Artificial Sequence
  Synthetic: descartes_6880_USP49
tatgcagtgatagcgttcag

SEQ ID NO: 10968 - DNA, 20 bp, Artificial Sequence
  Synthetic: descartes_6881_USP49
cactcaaagaacagtgcagg

SEQ ID NO: 10969 - DNA, 20 bp, Artificial Sequence
  Synthetic: descartes_6882_UTY
ggagaaggtgttgctgtgga

SEQ ID NO: 10970 - DNA, 20 bp, Artificial Sequence
  Synthetic: descartes_6883_UTY
gtagaagctaacaatgaaca

SEQ ID NO: 10971 - DNA, 20 bp, Artificial Sequence
  Synthetic: descartes_6884_UTY
ggaccaacattgacctctct

SEQ ID NO: 10972 - DNA, 20 bp, Artificial Sequence
  Synthetic: descartes_6885_UTY
acagaagtcattcagaacac

SEQ ID NO: 10973 - DNA, 20 bp, Artificial Sequence
  Synthetic: descartes_6886_UTY
gagatactgaatagcatagc

SEQ ID NO: 10974 - DNA, 20 bp, Artificial Sequence
  Synthetic: descartes_6887_UTY
tgtggtgtcaaacacaacga

SEQ ID NO: 10975 - DNA, 20 bp, Artificial Sequence
  Synthetic: descartes_6888_UTY
gctagccacagatctacttc

SEQ ID NO: 10976 - DNA, 20 bp, Artificial Sequence
  Synthetic: descartes_6889_UTY
gtgcacaatcatggcaatgt

SEQ ID NO: 10977 - DNA, 20 bp, Artificial Sequence
  Synthetic: descartes_6890_VAV1
ccagcagaactctctaaagg

SEQ ID NO: 10978 - DNA, 20 bp, Artificial Sequence
  Synthetic: descartes_6891_VAV1
tctgtgatccggtacagtcc

SEQ ID NO: 10979 - DNA, 20 bp, Artificial Sequence
  Synthetic: descartes_6892_VAV1
cttgtaacagggtgaagccc

SEQ ID NO: 10980 - DNA, 20 bp, Artificial Sequence
  Synthetic: descartes_6893_VAV1
gcacagccaaagcccgctat

SEQ ID NO: 10981 - DNA, 20 bp, Artificial Sequence
  Synthetic: descartes_6894_VAV1
tcctgagccctgcgatgtag

SEQ ID NO: 10982 - DNA, 20 bp, Artificial Sequence
  Synthetic: descartes_6895_VAV1
gctgtgccaaaatactttgt

SEQ ID NO: 10983 - DNA, 20 bp, Artificial Sequence
  Synthetic: descartes_6896_VAV1
ggaagtgagtatgaacacga

SEQ ID NO: 10984 - DNA, 20 bp, Artificial Sequence
  Synthetic: descartes_6897_VAV1
atgtgcttgacctcgacgtt

SEQ ID NO: 10985 - DNA, 20 bp, Artificial Sequence
  Synthetic: descartes_6898_VCAM1
gaggatacggatatgaaatc

SEQ ID NO: 10986 - DNA, 20 bp, Artificial Sequence
  Synthetic: descartes_6899_VCAM1
gattcacattcatatactcc

SEQ ID NO: 10987 - DNA, 20 bp, Artificial Sequence
  Synthetic: descartes_6900_VCAM1
tcttggagaacccagataga

SEQ ID NO: 10988 - DNA, 20 bp, Artificial Sequence
  Synthetic: descartes_6901_VCAM1
gtactgtgtctcctgtctcc

SEQ ID NO: 10989 - DNA, 20 bp, Artificial Sequence
  Synthetic: descartes_6902_VCAM1
ctaaggatccagagattcat

SEQ ID NO: 10990 - DNA, 20 bp, Artificial Sequence
  Synthetic: descartes_6903_VCAM1
tcctgagcttctcgtgctct

SEQ ID NO: 10991 - DNA, 20 bp, Artificial Sequence
  Synthetic: descartes_6904_VCAM1
tgtgaatccatccacaaagc

SEQ ID NO: 10992 - DNA, 20 bp, Artificial Sequence
  Synthetic: descartes_6905_VCAM1
atatccgtatcctccaaaaa

SEQ ID NO: 10993 - DNA, 20 bp, Artificial Sequence
  Synthetic: descartes_6906_VIPR1
gagtacactacatcatgttc

SEQ ID NO: 10994 - DNA, 20 bp, Artificial Sequence
  Synthetic: descartes_6907_VIPR1
gatgacaaggcagcgagttt

SEQ ID NO: 10995 - DNA, 20 bp, Artificial Sequence
  Synthetic: descartes_6908_VIPR1
catgctgacccgcgtcagcc

SEQ ID NO: 10996 - DNA, 20 bp, Artificial Sequence
  Synthetic: descartes_6909_VIPR1
agcctgaagtgaagatggtc

SEQ ID NO: 10997 - DNA, 20 bp, Artificial Sequence
  Synthetic: descartes_6910_VIPR1
tggtggctatcctctactgc

SEQ ID NO: 10998 - DNA, 20 bp, Artificial Sequence
  Synthetic: descartes_6911_VIPR1
catcatccgaatcctgcttc

SEQ ID NO: 10999 - DNA, 20 bp, Artificial Sequence
  Synthetic: descartes_6912_VIPR1
tgaagcaggattcggatgat

SEQ ID NO: 11000 - DNA, 20 bp, Artificial Sequence
  Synthetic: descartes_6913_VIPR1
gggttccagcccaggacgcc

SEQ ID NO: 11001 - DNA, 20 bp, Artificial Sequence
  Synthetic: descartes_6914_VTCN1
ggcttggtccatgagttcaa

SEQ ID NO: 11002 - DNA, 20 bp, Artificial Sequence
  Synthetic: descartes_6915_VTCN1
agccgcaaagaggcattgcc

SEQ ID NO: 11003 - DNA, 20 bp, Artificial Sequence
  Synthetic: descartes_6916_VTCN1
gcatcaggtaagggctgaga

SEQ ID NO: 11004 - DNA, 20 bp, Artificial Sequence
  Synthetic: descartes_6917_VTCN1
gcagctgtaggtgactccgc

SEQ ID NO: 11005 - DNA, 20 bp, Artificial Sequence
  Synthetic: descartes_6918_VTCN1
tactcaaggttagcattccc

SEQ ID NO: 11006 - DNA, 20 bp, Artificial Sequence
  Synthetic: descartes_6919_VTCN1
atcctgctccgacagctcat

SEQ ID NO: 11007 - DNA, 20 bp, Artificial Sequence
  Synthetic: descartes_6920_VTCN1
aatcatacaggagtatgtgt

SEQ ID NO: 11008 - DNA, 20 bp, Artificial Sequence
  Synthetic: descartes_6921_VTCN1
atatcccctgttgctttggc

SEQ ID NO: 11009 - DNA, 20 bp, Artificial Sequence
  Synthetic: descartes_6922_WAS
gtccaagcatctcaaagagt

SEQ ID NO: 11010 - DNA, 20 bp, Artificial Sequence
  Synthetic: descartes_6923_WAS
gggattgccccacccccacc

SEQ ID NO: 11011 - DNA, 20 bp, Artificial Sequence
  Synthetic: descartes_6924_WAS
gatcaaatccggcagggaat

SEQ ID NO: 11012 - DNA, 20 bp, Artificial Sequence
  Synthetic: descartes_6925_WAS
gaggtctcggcgtcggtgag

SEQ ID NO: 11013 - DNA, 20 bp, Artificial Sequence
  Synthetic: descartes_6926_WAS
atccaaaagcgctccccgac

SEQ ID NO: 11014 - DNA, 20 bp, Artificial Sequence
  Synthetic: descartes_6927_WAS
ttatcagctgggctaggtcc

SEQ ID NO: 11015 - DNA, 20 bp, Artificial Sequence
  Synthetic: descartes_6928_WAS
agatgcttggacgaaaatgc

SEQ ID NO: 11016 - DNA, 20 bp, Artificial Sequence
  Synthetic: descartes_6929_WAS
cagacgaggacgaggcccag

SEQ ID NO: 11017 - DNA, 20 bp, Artificial Sequence
  Synthetic: descartes_6930_WNT4
atggtgccactgaggtggag

SEQ ID NO: 11018 - DNA, 20 bp, Artificial Sequence
  Synthetic: descartes_6931_WNT4
cctcacaggagcctgacacc

SEQ ID NO: 11019 - DNA, 20 bp, Artificial Sequence
  Synthetic: descartes_6932_WNT4
tggatgtgcgggagagaagc

SEQ ID NO: 11020 - DNA, 20 bp, Artificial Sequence
  Synthetic: descartes_6933_WNT4
tcgcacgtctcctcctctga

SEQ ID NO: 11021 - DNA, 20 bp, Artificial Sequence
  Synthetic: descartes_6934_WNT4
cagctgcagcgttcagccag

SEQ ID NO: 11022 - DNA, 20 bp, Artificial Sequence
  Synthetic: descartes_6935_WNT4
cagtgacgcgggcgtgcagc

SEQ ID NO: 11023 - DNA, 20 bp, Artificial Sequence
  Synthetic: descartes_6936_YES1
agtggtgccaagttcatatc

SEQ ID NO: 11024 - DNA, 20 bp, Artificial Sequence
  Synthetic: descartes_6937_YES1
actctctcttactaagaaaa

SEQ ID NO: 11025 - DNA, 20 bp, Artificial Sequence
  Synthetic: descartes_6938_YES1
acattgtcaccccttatctc

SEQ ID NO: 11026 - DNA, 20 bp, Artificial Sequence
  Synthetic: descartes_6939_YES1
acagttggacacacagttgt

SEQ ID NO: 11027 - DNA, 20 bp, Artificial Sequence
  Synthetic: descartes_6940_YES1
cttaaggaaggagatggaaa

SEQ ID NO: 11028 - DNA, 20 bp, Artificial Sequence
  Synthetic: descartes_6941_YES1
ttagtaagagagagtgaaac

SEQ ID NO: 11029 - DNA, 20 bp, Artificial Sequence
  Synthetic: descartes_6942_YES1
caatcaaatggacagctcct

SEQ ID NO: 11030 - DNA, 20 bp, Artificial Sequence
  Synthetic: descartes_6943_YES1
cttcaagaagctcagataat

SEQ ID NO: 11031 - DNA, 20 bp, Artificial Sequence
  Synthetic: descartes_6944_ZAP70
gagaggccaaagtcgctgat

SEQ ID NO: 11032 - DNA, 20 bp, Artificial Sequence
  Synthetic: descartes_6945_ZAP70
ccatcgagcgccagctcaac

SEQ ID NO: 11033 - DNA, 20 bp, Artificial Sequence
  Synthetic: descartes_6946_ZAP70
gcctctccaaagcactgggt

SEQ ID NO: 11034 - DNA, 20 bp, Artificial Sequence
  Synthetic: descartes_6947_ZAP70
ctctggggcgcagaccgacg

SEQ ID NO: 11035 - DNA, 20 bp, Artificial Sequence
  Synthetic: descartes_6948_ZAP70
gctcagtgcgccagggcgtg

SEQ ID NO: 11036 - DNA, 20 bp, Artificial Sequence
  Synthetic: descartes_6949_ZAP70
cgctcggcctcctcacgcgt

SEQ ID NO: 11037 - DNA, 20 bp, Artificial Sequence
  Synthetic: descartes_6950_ZAP70
ccgccggcaatggcgtaggt

SEQ ID NO: 11038 - DNA, 20 bp, Artificial Sequence
  Synthetic: descartes_6951_ZAP70
tgcaccgtgacctggcggcc

SEQ ID NO: 11039 - DNA, 20 bp, Artificial Sequence
  Synthetic: descartes_6952_ZBTB1
gggacaatcattaccagata

SEQ ID NO: 11040 - DNA, 20 bp, Artificial Sequence
  Synthetic: descartes_6953_ZBTB1
gagccacagtatcttcatac

SEQ ID NO: 11041 - DNA, 20 bp, Artificial Sequence
  Synthetic: descartes_6954_ZBTB1
ctggaagcagaagaggaaca

SEQ ID NO: 11042 - DNA, 20 bp, Artificial Sequence
  Synthetic: descartes_6955_ZBTB1
acagctaaagccaaatccac

SEQ ID NO: 11043 - DNA, 20 bp, Artificial Sequence
  Synthetic: descartes_6956_ZBTB1
gggtaagaatgtatgaagat

SEQ ID NO: 11044 - DNA, 20 bp, Artificial Sequence
  Synthetic: descartes_6957_ZBTB1
gtataaatgtctgttagtac

SEQ ID NO: 11045 - DNA, 20 bp, Artificial Sequence
  Synthetic: descartes_6958_ZBTB1
cctgtgatagctgtggattt

SEQ ID NO: 11046 - DNA, 20 bp, Artificial Sequence
  Synthetic: descartes_6959_ZBTB1
agagtgccatcatggaagaa

SEQ ID NO: 11047 - DNA, 20 bp, Artificial Sequence
  Synthetic: descartes_6960_ZBTB7B
cctatacagccacactgacc

SEQ ID NO: 11048 - DNA, 20 bp, Artificial Sequence
  Synthetic: descartes_6961_ZBTB7B
cctgccccatggatgatctt

SEQ ID NO: 11049 - DNA, 20 bp, Artificial Sequence
  Synthetic: descartes_6962_ZBTB7B
ctctggcccccttggtttgc

SEQ ID NO: 11050 - DNA, 20 bp, Artificial Sequence
  Synthetic: descartes_6963_ZBTB7B
gccaaggaggaccacctgca

SEQ ID NO: 11051 - DNA, 20 bp, Artificial Sequence
  Synthetic: descartes_6964_ZBTB7B
actgagggcggtggcggagc

SEQ ID NO: 11052 - DNA, 20 bp, Artificial Sequence
  Synthetic: descartes_6965_ZBTB7B
cctgcgaggtctgcggtgtt

SEQ ID NO: 11053 - DNA, 20 bp, Artificial Sequence
  Synthetic: descartes_6966_ZBTB7B
ctgcaaaccaagggggccag

SEQ ID NO: 11054 - DNA, 20 bp, Artificial Sequence
  Synthetic: descartes_6967_ZBTB7B
ccacagccacggcctctgga

SEQ ID NO: 11055 - DNA, 20 bp, Artificial Sequence
  Synthetic: descartes_6968_ZC3H12A
caacgacacataccgtgacc

SEQ ID NO: 11056 - DNA, 20 bp, Artificial Sequence
  Synthetic: descartes_6969_ZC3H12A
aggacagccacagccgtcag

SEQ ID NO: 11057 - DNA, 20 bp, Artificial Sequence
  Synthetic: descartes_6970_ZC3H12A
ggcccacagactggctccca

SEQ ID NO: 11058 - DNA, 20 bp, Artificial Sequence
  Synthetic: descartes_6971_ZC3H12A
ccccgcacctggtggaggct

SEQ ID NO: 11059 - DNA, 20 bp, Artificial Sequence
  Synthetic: descartes_6972_ZC3H12A
accagctcacccagcaccgt

SEQ ID NO: 11060 - DNA, 20 bp, Artificial Sequence
  Synthetic: descartes_6973_ZC3H12A
tggagcggggccacacagac

SEQ ID NO: 11061 - DNA, 20 bp, Artificial Sequence
  Synthetic: descartes_6974_ZC3H12A
gccgggccatgggtgctggc

SEQ ID NO: 11062 - DNA, 20 bp, Artificial Sequence
  Synthetic: descartes_6975_ZC3H12A
gagcacaggaagcagccgtg

SEQ ID NO: 11063 - DNA, 20 bp, Artificial Sequence
  Synthetic: descartes_6976_ZCWPW1
agagggaaaagaagttagaa

SEQ ID NO: 11064 - DNA, 20 bp, Artificial Sequence
  Synthetic: descartes_6977_ZCWPW1
ctgcctagagatctcttcat

SEQ ID NO: 11065 - DNA, 20 bp, Artificial Sequence
  Synthetic: descartes_6978_ZCWPW1
ggaaggaacactggacccag

SEQ ID NO: 11066 - DNA, 20 bp, Artificial Sequence
  Synthetic: descartes_6979_ZCWPW1
ctggtccctgatctgagaat

SEQ ID NO: 11067 - DNA, 20 bp, Artificial Sequence
  Synthetic: descartes_6980_ZCWPW1
aagaagaaagaggaaaaagc

SEQ ID NO: 11068 - DNA, 20 bp, Artificial Sequence
  Synthetic: descartes_6981_ZCWPW1
cctctgaaaagctggctgcc

SEQ ID NO: 11069 - DNA, 20 bp, Artificial Sequence
  Synthetic: descartes_6982_ZCWPW1
tcctgttccctgcttggaac

SEQ ID NO: 11070 - DNA, 20 bp, Artificial Sequence
  Synthetic: descartes_6983_ZCWPW1
cccattcgtaagcgagtcaa

SEQ ID NO: 11071 - DNA, 20 bp, Artificial Sequence
  Synthetic: descartes_6984_ZCWPW2
aagggaaatatgtaacttat

SEQ ID NO: 11072 - DNA, 20 bp, Artificial Sequence
  Synthetic: descartes_6985_ZCWPW2
cactgaggaatccattgcat

SEQ ID NO: 11073 - DNA, 20 bp, Artificial Sequence
  Synthetic: descartes_6986_ZCWPW2
tgaagaagacttccctgaag

SEQ ID NO: 11074 - DNA, 20 bp, Artificial Sequence
  Synthetic: descartes_6987_ZCWPW2
attctcacattgaacccaca

SEQ ID NO: 11075 - DNA, 20 bp, Artificial Sequence
  Synthetic: descartes_6988_ZCWPW2
ccaaaaccaggcttccaaga

SEQ ID NO: 11076 - DNA, 20 bp, Artificial Sequence
  Synthetic: descartes_6989_ZCWPW2
atgtgatactataatgtcca

SEQ ID NO: 11077 - DNA, 20 bp, Artificial Sequence
  Synthetic: descartes_6990_ZCWPW2
ctaaaagagctggagcaaat

SEQ ID NO: 11078 - DNA, 20 bp, Artificial Sequence
  Synthetic: descartes_6991_ZCWPW2
catccgggtcataagttaca

SEQ ID NO: 11079 - DNA, 20 bp, Artificial Sequence
  Synthetic: descartes_6992_ZFP91
ccaagggctcaggaagaaga

SEQ ID NO: 11080 - DNA, 20 bp, Artificial Sequence
  Synthetic: descartes_6993_ZFP91
acctccacctctacttccac

SEQ ID NO: 11081 - DNA, 20 bp, Artificial Sequence
  Synthetic: descartes_6994_ZFP91
cttgtcgacaaaaggcatct

SEQ ID NO: 11082 - DNA, 20 bp, Artificial Sequence
  Synthetic: descartes_6995_ZFP91
ccttgtgtgccactacgctg

SEQ ID NO: 11083 - DNA, 20 bp, Artificial Sequence
  Synthetic: descartes_6996_ZFP91
gcatgtcgcagaagttgctt

SEQ ID NO: 11084 - DNA, 20 bp, Artificial Sequence
  Synthetic: descartes_6997_ZFP91
ccacagatattgcaagaaaa

SEQ ID NO: 11085 - DNA, 20 bp, Artificial Sequence
  Synthetic: descartes_6998_ZFP91
ttgcaatatctgtggcaaaa

SEQ ID NO: 11086 - DNA, 20 bp, Artificial Sequence
  Synthetic: descartes_6999_ZFP91
gttctgacttgcaaatgagc

SEQ ID NO: 11087 - DNA, 20 bp, Artificial Sequence
  Synthetic: descartes_7000_ZGPAT
cctgtaccccactcacaagt

SEQ ID NO: 11088 - DNA, 20 bp, Artificial Sequence
  Synthetic: descartes_7001_ZGPAT
attgaggaagtcaaacacat

SEQ ID NO: 11089 - DNA, 20 bp, Artificial Sequence
  Synthetic: descartes_7002_ZGPAT
cctccaggaagaacgggcac

SEQ ID NO: 11090 - DNA, 20 bp, Artificial Sequence
  Synthetic: descartes_7003_ZGPAT
ggaacggtctctgatccgga

SEQ ID NO: 11091 - DNA, 20 bp, Artificial Sequence
  Synthetic: descartes_7004_ZGPAT
acttcctcaatgaaaagctg

SEQ ID NO: 11092 - DNA, 20 bp, Artificial Sequence
  Synthetic: descartes_7005_ZGPAT
cgggaggccatcactgaggc

SEQ ID NO: 11093 - DNA, 20 bp, Artificial Sequence
  Synthetic: descartes_7006_ZGPAT
ggccgacacgcggaaggccg

SEQ ID NO: 11094 - DNA, 20 bp, Artificial Sequence
  Synthetic: descartes_7007_ZGPAT
actcgctgctgctgagggag

SEQ ID NO: 11095 - DNA, 20 bp, Artificial Sequence
  Synthetic: descartes_7008_ZMYND11
gcccaaaccagctcatgatt

SEQ ID NO: 11096 - DNA, 20 bp, Artificial Sequence
  Synthetic: descartes_7009_ZMYND11
gtgtgtatcattccaagtgt

SEQ ID NO: 11097 - DNA, 20 bp, Artificial Sequence
  Synthetic: descartes_7010_ZMYND11
gctggccaaaacccaaaacc

SEQ ID NO: 11098 - DNA, 20 bp, Artificial Sequence
  Synthetic: descartes_7011_ZMYND11
cctggagaggtgttgatatg

SEQ ID NO: 11099 - DNA, 20 bp, Artificial Sequence
  Synthetic: descartes_7012_ZMYND11
gccagccaaagtcatgcaga

SEQ ID NO: 11100 - DNA, 20 bp, Artificial Sequence
  Synthetic: descartes_7013_ZMYND11
tgtccatctcaccctgcatg

SEQ ID NO: 11101 - DNA, 20 bp, Artificial Sequence
  Synthetic: descartes_7014_ZMYND11
catcattacacagatatgtc

SEQ ID NO: 11102 - DNA, 20 bp, Artificial Sequence
  Synthetic: descartes_7015_ZMYND11
attagttgtatcattgttat

SEQ ID NO: 11103 - DNA, 20 bp, Artificial Sequence
  Synthetic: descartes_7016_ZMYND8
ggacaccctacacacccaac

SEQ ID NO: 11104 - DNA, 20 bp, Artificial Sequence
  Synthetic: descartes_7017_ZMYND8
cgtggagaacatccgcagga

SEQ ID NO: 11105 - DNA, 20 bp, Artificial Sequence
  Synthetic: descartes_7018_ZMYND8
ggaggacgtttgaaacttac

SEQ ID NO: 11106 - DNA, 20 bp, Artificial Sequence
  Synthetic: descartes_7019_ZMYND8
ctatatgaagcagccactca

SEQ ID NO: 11107 - DNA, 20 bp, Artificial Sequence
  Synthetic: descartes_7020_ZMYND8
tgtgaaaaagactaagagca

SEQ ID NO: 11108 - DNA, 20 bp, Artificial Sequence
  Synthetic: descartes_7021_ZMYND8
gaccctcccgcccagaatgg

SEQ ID NO: 11109 - DNA, 20 bp, Artificial Sequence
  Synthetic: descartes_7022_ZMYND8
gtcgtgataggagctgacag

SEQ ID NO: 11110 - DNA, 20 bp, Artificial Sequence
  Synthetic: descartes_7023_ZMYND8
acagcagatggctctttgtc

SEQ ID NO: 11111 - DNA, 20 bp, Artificial Sequence
  Synthetic: descartes_7024_ZNF683
cctccaggcctggaagcttt

SEQ ID NO: 11112 - DNA, 20 bp, Artificial Sequence
  Synthetic: descartes_7025_ZNF683
ccctgggatgtcgaggacac

SEQ ID NO: 11113 - DNA, 20 bp, Artificial Sequence
  Synthetic: descartes_7026_ZNF683
tcagatgccaccgccataag

SEQ ID NO: 11114 - DNA, 20 bp, Artificial Sequence
  Synthetic: descartes_7027_ZNF683
acctcatctatgtcatagcc

SEQ ID NO: 11115 - DNA, 20 bp, Artificial Sequence
  Synthetic: descartes_7028_ZNF683
tcctccacgccttctaccct

SEQ ID NO: 11116 - DNA, 20 bp, Artificial Sequence
  Synthetic: descartes_7029_ZNF683
ctggagatgccatgccacca

SEQ ID NO: 11117 - DNA, 20 bp, Artificial Sequence
  Synthetic: descartes_7030_ZNF683
tgcccctgtccccctgtcaa

SEQ ID NO: 11118 - DNA, 20 bp, Artificial Sequence
  Synthetic: descartes_7031_ZNF683
ccagcttgtccttgttctgt

SEQ ID NO: 11119 - DNA, 20 bp, Artificial Sequence
  Synthetic: descartes_7032_ZP3
aatgcagaagaggcatcagt

SEQ ID NO: 11120 - DNA, 20 bp, Artificial Sequence
  Synthetic: descartes_7033_ZP3
ccacggggcgggggtcatgg

SEQ ID NO: 11121 - DNA, 20 bp, Artificial Sequence
  Synthetic: descartes_7034_ZP3
aggttggactccacgagtgt

SEQ ID NO: 11122 - DNA, 20 bp, Artificial Sequence
  Synthetic: descartes_7035_ZP3
gcaccgggaagctcatcagg

SEQ ID NO: 11123 - DNA, 20 bp, Artificial Sequence
  Synthetic: descartes_7036_ZP3
tgcctggaggtgggctgcat

SEQ ID NO: 11124 - DNA, 20 bp, Artificial Sequence
  Synthetic: descartes_7037_ZP3
tggagtcattagcaaagtgg

SEQ ID NO: 11125 - DNA, 20 bp, Artificial Sequence
  Synthetic: descartes_7038_ZP3
ttacagcattgacagatgtc

SEQ ID NO: 11126 - DNA, 20 bp, Artificial Sequence
  Synthetic: descartes_7039_ZP3
tggaccactgcgtggccaca

SEQ ID NO: 11127 - DNA, 20 bp, Artificial Sequence
  Synthetic: descartes_7040_ZP4
actctcccaccaccctttcc

SEQ ID NO: 11128 - DNA, 20 bp, Artificial Sequence
  Synthetic: descartes_7041_ZP4
cgtggaggtctccatccttc

SEQ ID NO: 11129 - DNA, 20 bp, Artificial Sequence
  Synthetic: descartes_7042_ZP4
cctctcaccaccagcgcttc

SEQ ID NO: 11130 - DNA, 20 bp, Artificial Sequence
  Synthetic: descartes_7043_ZP4
acatccctagttgccaccag

SEQ ID NO: 11131 - DNA, 20 bp, Artificial Sequence
  Synthetic: descartes_7044_ZP4
ttgacagccaagtaggatac

SEQ ID NO: 11132 - DNA, 20 bp, Artificial Sequence
  Synthetic: descartes_7045_ZP4
ctgagacccagcctggaccc

SEQ ID NO: 11133 - DNA, 20 bp, Artificial Sequence
  Synthetic: descartes_7046_ZP4
acaacagttctcagaacact

SEQ ID NO: 11134 - DNA, 20 bp, Artificial Sequence
  Synthetic: descartes_7047_ZP4
atatactgctcggtctccag

SEQ ID NO: 11135 - DNA, 20 bp, Artificial Sequence
  Synthetic: descartes_7048_NTC
ttgcgattgactaccgcggt

SEQ ID NO: 11136 - DNA, 20 bp, Artificial Sequence
  Synthetic: descartes_7049_NTC
ctggatcagctgctttagaa

SEQ ID NO: 11137 - DNA, 20 bp, Artificial Sequence
  Synthetic: descartes_7050_NTC
aacatagacccacttgccta

SEQ ID NO: 11138 - DNA, 20 bp, Artificial Sequence
  Synthetic: descartes_7051_NTC
ctctctcgatgtagtttatt

SEQ ID NO: 11139 - DNA, 20 bp, Artificial Sequence
  Synthetic: descartes_7052_NTC
tccagagccagctatgaaga

SEQ ID NO: 11140 - DNA, 20 bp, Artificial Sequence
  Synthetic: descartes_7053_NTC
caagtcaaaacaacggtaat

SEQ ID NO: 11141 - DNA, 20 bp, Artificial Sequence
  Synthetic: descartes_7054_NTC
tctaccattggttcgcgggt

SEQ ID NO: 11142 - DNA, 20 bp, Artificial Sequence
  Synthetic: descartes_7055_NTC
ggaagtgctttggcgcgtga

SEQ ID NO: 11143 - DNA, 20 bp, Artificial Sequence
  Synthetic: descartes_7056_NTC
gactcgacgggttttagtca

SEQ ID NO: 11144 - DNA, 20 bp, Artificial Sequence
  Synthetic: descartes_7057_NTC
tgcctatacatttccaaata

SEQ ID NO: 11145 - DNA, 20 bp, Artificial Sequence
  Synthetic: descartes_7058_NTC
aacgcatatggaagctggtt

SEQ ID NO: 11146 - DNA, 20 bp, Artificial Sequence
  Synthetic: descartes_7059_NTC
gcctttcggattgcttccct

SEQ ID NO: 11147 - DNA, 20 bp, Artificial Sequence
  Synthetic: descartes_7060_NTC
agcagagccatgagtaatat

SEQ ID NO: 11148 - DNA, 20 bp, Artificial Sequence
  Synthetic: descartes_7061_NTC
actctactggctcgataccc

SEQ ID NO: 11149 - DNA, 20 bp, Artificial Sequence
  Synthetic: descartes_7062_NTC
tcaattcgaacaaacccttc

SEQ ID NO: 11150 - DNA, 20 bp, Artificial Sequence
  Synthetic: descartes_7063_NTC
tcgctttttcccggttctgt

SEQ ID NO: 11151 - DNA, 20 bp, Artificial Sequence
  Synthetic: descartes_7064_NTC
acgggattgaccgtacagta

SEQ ID NO: 11152 - DNA, 20 bp, Artificial Sequence
  Synthetic: descartes_7065_NTC
tagcctcaatgtcgctctgg

SEQ ID NO: 11153 - DNA, 20 bp, Artificial Sequence
  Synthetic: descartes_7066_NTC
ctcatatccgtctcactcta

SEQ ID NO: 11154 - DNA, 20 bp, Artificial Sequence
  Synthetic: descartes_7067_NTC
cacccctaaaatagcatgtc

SEQ ID NO: 11155 - DNA, 20 bp, Artificial Sequence
  Synthetic: descartes_7068_NTC
gcgatggcgtaaccaaaaaa

SEQ ID NO: 11156 - DNA, 20 bp, Artificial Sequence
  Synthetic: descartes_7069_NTC
agctcgatgctaatgcagat

SEQ ID NO: 11157 - DNA, 20 bp, Artificial Sequence
  Synthetic: descartes_7070_NTC
ccaccatcagccttgggagc

SEQ ID NO: 11158 - DNA, 20 bp, Artificial Sequence
  Synthetic: descartes_7071_NTC
taacgtcatctacatctatg

SEQ ID NO: 11159 - DNA, 20 bp, Artificial Sequence
  Synthetic: descartes_7072_NTC
tggctgtcctgcgagtggat

SEQ ID NO: 11160 - DNA, 20 bp, Artificial Sequence
  Synthetic: descartes_7073_NTC
gtagagccattgatctgtac

SEQ ID NO: 11161 - DNA, 20 bp, Artificial Sequence
  Synthetic: descartes_7074_NTC
tcgtaaggaagtcagcgggc

SEQ ID NO: 11162 - DNA, 20 bp, Artificial Sequence
  Synthetic: descartes_7075_NTC
cgcggtcgagcaaccggttg

SEQ ID NO: 11163 - DNA, 20 bp, Artificial Sequence
  Synthetic: descartes_7076_NTC
ccgcttaagacccacaagag

SEQ ID NO: 11164 - DNA, 20 bp, Artificial Sequence
  Synthetic: descartes_7077_NTC
gctcggtagaaccttctcac

SEQ ID NO: 11165 - DNA, 20 bp, Artificial Sequence
  Synthetic: descartes_7078_NTC
tctaccgagtccaaaggttt

SEQ ID NO: 11166 - DNA, 20 bp, Artificial Sequence
  Synthetic: descartes_7079_NTC
ctgagataacttagtccttc

SEQ ID NO: 11167 - DNA, 20 bp, Artificial Sequence
  Synthetic: descartes_7080_NTC
agacgctctttagaagcctg

SEQ ID NO: 11168 - DNA, 20 bp, Artificial Sequence
  Synthetic: descartes_7081_NTC
cgttaacagcatttgcgaac

SEQ ID NO: 11169 - DNA, 20 bp, Artificial Sequence
  Synthetic: descartes_7082_NTC
tcaaccacgctatccaatgg

SEQ ID NO: 11170 - DNA, 20 bp, Artificial Sequence
  Synthetic: descartes_7083_NTC
cactgctctgtgtctattta

SEQ ID NO: 11171 - DNA, 20 bp, Artificial Sequence
  Synthetic: descartes_7084_NTC
tcgtgtacagtgcggcggga

SEQ ID NO: 11172 - DNA, 20 bp, Artificial Sequence
  Synthetic: descartes_7085_NTC
tcgcggaacgaagtaatttg

SEQ ID NO: 11173 - DNA, 20 bp, Artificial Sequence
  Synthetic: descartes_7086_NTC
acaacccttacacaacacgt

SEQ ID NO: 11174 - DNA, 20 bp, Artificial Sequence
  Synthetic: descartes_7087_NTC
aggggaataattgatattcg

SEQ ID NO: 11175 - DNA, 20 bp, Artificial Sequence
  Synthetic: descartes_7088_NTC
aactcgcagactcgtccaat

SEQ ID NO: 11176 - DNA, 20 bp, Artificial Sequence
  Synthetic: descartes_7089_NTC
aaaaccataacaggaaggac

SEQ ID NO: 11177 - DNA, 20 bp, Artificial Sequence
  Synthetic: descartes_7090_NTC
ttagcgattttgctacacgc

SEQ ID NO: 11178 - DNA, 20 bp, Artificial Sequence
  Synthetic: descartes_7091_NTC
cgagattgcagtcattctcg

SEQ ID NO: 11179 - DNA, 20 bp, Artificial Sequence
  Synthetic: descartes_7092_NTC
cgaccgttactctgcacgcc

SEQ ID NO: 11180 - DNA, 20 bp, Artificial Sequence
  Synthetic: descartes_7093_NTC
ctcccaacttgccgtgttat

SEQ ID NO: 11181 - DNA, 20 bp, Artificial Sequence
  Synthetic: descartes_7094_NTC
aattgcaaccgtttaagggt

SEQ ID NO: 11182 - DNA, 20 bp, Artificial Sequence
  Synthetic: descartes_7095_NTC
attcatagttgccagaggag

SEQ ID NO: 11183 - DNA, 20 bp, Artificial Sequence
  Synthetic: descartes_7096_NTC
tttagtatggagtaaacgca

SEQ ID NO: 11184 - DNA, 20 bp, Artificial Sequence
  Synthetic: descartes_7097_NTC
cccggcccaaaagctgcgtc

SEQ ID NO: 11185 - DNA, 20 bp, Artificial Sequence
  Synthetic: descartes_7098_NTC
catcattggagcggtacctt

SEQ ID NO: 11186 - DNA, 20 bp, Artificial Sequence
  Synthetic: descartes_7099_NTC
cttattatctgccattaaat

SEQ ID NO: 11187 - DNA, 20 bp, Artificial Sequence
  Synthetic: descartes_7100_NTC
tcgattagtaccgtgccagg

SEQ ID NO: 11188 - DNA, 20 bp, Artificial Sequence
  Synthetic: descartes_7101_NTC
acaccgcgattgccaattac

SEQ ID NO: 11189 - DNA, 20 bp, Artificial Sequence
  Synthetic: descartes_7102_NTC
gcacgacttaatgtgttatg

SEQ ID NO: 11190 - DNA, 20 bp, Artificial Sequence
  Synthetic: descartes_7103_NTC
tttgttgtactcaaaaaaat

SEQ ID NO: 11191 - DNA, 20 bp, Artificial Sequence
  Synthetic: descartes_7104_NTC
aacagttacatatgtgagtc

SEQ ID NO: 11192 - DNA, 20 bp, Artificial Sequence
  Synthetic: descartes_7105_NTC
cgaaatgcagtcctttttag

SEQ ID NO: 11193 - DNA, 20 bp, Artificial Sequence
  Synthetic: descartes_7106_NTC
gcgcggggtctgtctcaaac

SEQ ID NO: 11194 - DNA, 20 bp, Artificial Sequence
  Synthetic: descartes_7107_NTC
tgtggattgtatagtgcctc

SEQ ID NO: 11195 - DNA, 20 bp, Artificial Sequence
  Synthetic: descartes_7108_NTC
ttgcgtcccataccatgggc

SEQ ID NO: 11196 - DNA, 20 bp, Artificial Sequence
  Synthetic: descartes_7109_NTC
aactcacgcattagcgtatt

SEQ ID NO: 11197 - DNA, 20 bp, Artificial Sequence
  Synthetic: descartes_7110_NTC
cgtagcgtttcgaacgaact

SEQ ID NO: 11198 - DNA, 20 bp, Artificial Sequence
  Synthetic: descartes_7111_NTC
gccctatctcgttgtcacgc

SEQ ID NO: 11199 - DNA, 20 bp, Artificial Sequence
  Synthetic: descartes_7112_NTC
aatcttgtatgccgtaagta

SEQ ID NO: 11200 - DNA, 20 bp, Artificial Sequence
  Synthetic: descartes_7113_NTC
gtcaaggattgggagatatc

SEQ ID NO: 11201 - DNA, 20 bp, Artificial Sequence
  Synthetic: descartes_7114_NTC
cgagggtttgctaccatgcc

SEQ ID NO: 11202 - DNA, 20 bp, Artificial Sequence
  Synthetic: descartes_7115_NTC
gcttggttccttgtactgtt

SEQ ID NO: 11203 - DNA, 20 bp, Artificial Sequence
  Synthetic: descartes_7116_NTC
gttattctactcattctgac

SEQ ID NO: 11204 - DNA, 20 bp, Artificial Sequence
  Synthetic: descartes_7117_NTC
ggcttagcaaccgataaagt

SEQ ID NO: 11205 - DNA, 20 bp, Artificial Sequence
  Synthetic: descartes_7118_NTC
ggtctcaacatctaggtgga

SEQ ID NO: 11206 - DNA, 20 bp, Artificial Sequence
  Synthetic: descartes_7119_NTC
tttgttaacactccgaccga

SEQ ID NO: 11207 - DNA, 20 bp, Artificial Sequence
  Synthetic: descartes_7120_NTC
catctggtcgacggaccacc

SEQ ID NO: 11208 - DNA, 20 bp, Artificial Sequence
  Synthetic: descartes_7121_NTC
ttgcaaacttgttgttgtgg

SEQ ID NO: 11209 - DNA, 20 bp, Artificial Sequence
  Synthetic: descartes_7122_NTC
tcgacctagaacagcctatt

SEQ ID NO: 11210 - DNA, 20 bp, Artificial Sequence
  Synthetic: descartes_7123_NTC
aatgacaaagtcttgtagtc

SEQ ID NO: 11211 - DNA, 20 bp, Artificial Sequence
  Synthetic: descartes_7124_NTC
gccaaacgcgtgagcggcta

SEQ ID NO: 11212 - DNA, 20 bp, Artificial Sequence
  Synthetic: descartes_7125_NTC
gccagacgagttatagtcca

SEQ ID NO: 11213 - DNA, 20 bp, Artificial Sequence
  Synthetic: descartes_7126_NTC
agaatgaggtgcctatccgc

SEQ ID NO: 11214 - DNA, 20 bp, Artificial Sequence
  Synthetic: descartes_7127_NTC
gttgttagtcccgtgaacat

SEQ ID NO: 11215 - DNA, 20 bp, Artificial Sequence
  Synthetic: descartes_7128_NTC
tgggccctgtccttggtcca

SEQ ID NO: 11216 - DNA, 20 bp, Artificial Sequence
  Synthetic: descartes_7129_NTC
gccactgggccatataggcc

SEQ ID NO: 11217 - DNA, 20 bp, Artificial Sequence
  Synthetic: descartes_7130_NTC
actatgacttcatcatgaaa

SEQ ID NO: 11218 - DNA, 20 bp, Artificial Sequence
  Synthetic: descartes_7131_NTC
acccagaatcgagtcaggag

SEQ ID NO: 11219 - DNA, 20 bp, Artificial Sequence
  Synthetic: descartes_7132_NTC
aaaaagagtgctacagtcct

SEQ ID NO: 11220 - DNA, 20 bp, Artificial Sequence
  Synthetic: descartes_7133_NTC
gggccaaattaaaggcggcg

SEQ ID NO: 11221 - DNA, 20 bp, Artificial Sequence
  Synthetic: descartes_7134_NTC
gtctattgagcagatgaccc

SEQ ID NO: 11222 - DNA, 20 bp, Artificial Sequence
  Synthetic: descartes_7135_NTC
ggtaatcctgaaccccgatt

SEQ ID NO: 11223 - DNA, 20 bp, Artificial Sequence
  Synthetic: descartes_7136_NTC
atggtccgtcctcctaccgt

SEQ ID NO: 11224 - DNA, 20 bp, Artificial Sequence
  Synthetic: descartes_7137_NTC
atctcgcagctgcttgaaga

SEQ ID NO: 11225 - DNA, 20 bp, Artificial Sequence
  Synthetic: descartes_7138_NTC
taagccggcgtctctcacgt

SEQ ID NO: 11226 - DNA, 20 bp, Artificial Sequence
  Synthetic: descartes_7139_NTC
ctggacacggtagtctcgag

SEQ ID NO: 11227 - DNA, 20 bp, Artificial Sequence
  Synthetic: descartes_7140_NTC
tcaaggaaagtcattacgca

SEQ ID NO: 11228 - DNA, 20 bp, Artificial Sequence
  Synthetic: descartes_7141_NTC
atacgctacgggacctcatg

SEQ ID NO: 11229 - DNA, 20 bp, Artificial Sequence
  Synthetic: descartes_7142_NTC
cttcacgaggcttctgctcg

SEQ ID NO: 11230 - DNA, 20 bp, Artificial Sequence
  Synthetic: descartes_7143_NTC
cgaatagtcctgaagactta

SEQ ID NO: 11231 - DNA, 20 bp, Artificial Sequence
  Synthetic: descartes_7144_NTC
tgccctggacccgttgcgta

SEQ ID NO: 11232 - DNA, 20 bp, Artificial Sequence
  Synthetic: descartes_7145_NTC
atgtccgtagtactcccccc

SEQ ID NO: 11233 - DNA, 20 bp, Artificial Sequence
  Synthetic: descartes_7146_NTC
gacgaaaagttacgcatgct

SEQ ID NO: 11234 - DNA, 20 bp, Artificial Sequence
  Synthetic: descartes_7147_NTC
ctggtgctataatgtgaatc

SEQ ID NO: 11235 - DNA, 20 bp, Artificial Sequence
  Synthetic: descartes_7148_NTC
agtccatgagagtcgcaatg

SEQ ID NO: 11236 - DNA, 20 bp, Artificial Sequence
  Synthetic: descartes_7149_NTC
taacagttaccggttttagt

SEQ ID NO: 11237 - DNA, 20 bp, Artificial Sequence
  Synthetic: descartes_7150_NTC
cggcgtgccttccgcactcc

SEQ ID NO: 11238 - DNA, 20 bp, Artificial Sequence
  Synthetic: descartes_7151_NTC
taactttcaactacaatgca

SEQ ID NO: 11239 - DNA, 20 bp, Artificial Sequence
  Synthetic: descartes_7152_NTC
gcacctagttgcaataattg

SEQ ID NO: 11240 - DNA, 20 bp, Artificial Sequence
  Synthetic: descartes_7153_NTC
gagcgcgtccagaggtatcg

SEQ ID NO: 11241 - DNA, 20 bp, Artificial Sequence
  Synthetic: descartes_7154_NTC
gcaccgtgctgtgttccaga

SEQ ID NO: 11242 - DNA, 20 bp, Artificial Sequence
  Synthetic: descartes_7155_NTC
caccgcaacatttttagccg

SEQ ID NO: 11243 - DNA, 20 bp, Artificial Sequence
  Synthetic: descartes_7156_NTC
cttcaagtcataagcttaat

SEQ ID NO: 11244 - DNA, 20 bp, Artificial Sequence
  Synthetic: descartes_7157_NTC
taggaacggctcacgtcatt

SEQ ID NO: 11245 - DNA, 20 bp, Artificial Sequence
  Synthetic: descartes_7158_NTC
gctgtttcggaccaagccta

SEQ ID NO: 11246 - DNA, 20 bp, Artificial Sequence
  Synthetic: descartes_7159_NTC
cggggtcagctaagcacgcc

SEQ ID NO: 11247 - DNA, 20 bp, Artificial Sequence
  Synthetic: descartes_7160_NTC
cagacgctgtctttacaatc

SEQ ID NO: 11248 - DNA, 20 bp, Artificial Sequence
  Synthetic: descartes_7161_NTC
actttagcgacaccagctca

SEQ ID NO: 11249 - DNA, 20 bp, Artificial Sequence
  Synthetic: descartes_7162_NTC
tggttcggttcgctagggac

SEQ ID NO: 11250 - DNA, 20 bp, Artificial Sequence
  Synthetic: descartes_7163_NTC
gcatggttgtttcatcgagt

SEQ ID NO: 11251 - DNA, 20 bp, Artificial Sequence
  Synthetic: descartes_7164_NTC
gggcgcactgcgtttggcgc

SEQ ID NO: 11252 - DNA, 20 bp, Artificial Sequence
  Synthetic: descartes_7165_NTC
tgctatggcgctcctttagg

SEQ ID NO: 11253 - DNA, 20 bp, Artificial Sequence
  Synthetic: descartes_7166_NTC
cgactaacataagagccggg

SEQ ID NO: 11254 - DNA, 20 bp, Artificial Sequence
  Synthetic: descartes_7167_NTC
cttgaaggagtaaagtcact

SEQ ID NO: 11255 - DNA, 20 bp, Artificial Sequence
  Synthetic: descartes_7168_NTC
cgtcatatactcggccttat

SEQ ID NO: 11256 - DNA, 20 bp, Artificial Sequence
  Synthetic: descartes_7169_NTC
atgatccagagcaatgacat

SEQ ID NO: 11257 - DNA, 20 bp, Artificial Sequence
  Synthetic: descartes_7170_NTC
tgggtgatgacaggagactc

SEQ ID NO: 11258 - DNA, 20 bp, Artificial Sequence
  Synthetic: descartes_7171_NTC
catagcaccgatagataaat

SEQ ID NO: 11259 - DNA, 20 bp, Artificial Sequence
  Synthetic: descartes_7172_NTC
gggtgtattgattccaatgt

SEQ ID NO: 11260 - DNA, 20 bp, Artificial Sequence
  Synthetic: descartes_7173_NTC
gccgtaacaatatgcggact

SEQ ID NO: 11261 - DNA, 20 bp, Artificial Sequence
  Synthetic: descartes_7174_NTC
gtttgttgtccaatgtagcg

SEQ ID NO: 11262 - DNA, 20 bp, Artificial Sequence
  Synthetic: descartes_7175_NTC
atacgttgacggaagaaaag

SEQ ID NO: 11263 - DNA, 20 bp, Artificial Sequence
  Synthetic: descartes_7176_NTC
ccagggtctacctggactgt

SEQ ID NO: 11264 - DNA, 20 bp, Artificial Sequence
  Synthetic: descartes_7177_NTC
cactttgacctagtacgcta

SEQ ID NO: 11265 - DNA, 20 bp, Artificial Sequence
  Synthetic: descartes_7178_NTC
gggaagagcttaactcctga

SEQ ID NO: 11266 - DNA, 20 bp, Artificial Sequence
  Synthetic: descartes_7179_NTC
catagtccggtagccacgca

SEQ ID NO: 11267 - DNA, 20 bp, Artificial Sequence
  Synthetic: descartes_7180_NTC
tggatggggacgacccacct

SEQ ID NO: 11268 - DNA, 20 bp, Artificial Sequence
  Synthetic: descartes_7181_NTC
ctgcctcaggtagcactacg

SEQ ID NO: 11269 - DNA, 20 bp, Artificial Sequence
  Synthetic: descartes_7182_NTC
tagaggatctctagcatatt

SEQ ID NO: 11270 - DNA, 20 bp, Artificial Sequence
  Synthetic: descartes_7183_NTC
tgtagtatactcaagacctc

SEQ ID NO: 11271 - DNA, 20 bp, Artificial Sequence
  Synthetic: descartes_7184_NTC
gtagtcaaaagtgacgaaag

SEQ ID NO: 11272 - DNA, 20 bp, Artificial Sequence
  Synthetic: descartes_7185_NTC
tgcgatctacaccccgctgg

SEQ ID NO: 11273 - DNA, 20 bp, Artificial Sequence
  Synthetic: descartes_7186_NTC
tgctggtgtactttggagca

SEQ ID NO: 11274 - DNA, 20 bp, Artificial Sequence
  Synthetic: descartes_7187_NTC
ctgttacacctgagaattaa

SEQ ID NO: 11275 - DNA, 20 bp, Artificial Sequence
  Synthetic: descartes_7188_NTC
aaggagtctgcgatgcgagc

SEQ ID NO: 11276 - DNA, 20 bp, Artificial Sequence
  Synthetic: descartes_7189_NTC
gatacgaagagtgtgaccca

SEQ ID NO: 11277 - DNA, 20 bp, Artificial Sequence
  Synthetic: descartes_7190_NTC
cccggcagccggttcgtggc

SEQ ID NO: 11278 - DNA, 20 bp, Artificial Sequence
  Synthetic: descartes_7191_NTC
ggttcatttagtttaggagg

SEQ ID NO: 11279 - DNA, 20 bp, Artificial Sequence
  Synthetic: descartes_7192_NTC
aaatgtgctctcaaaaggcg

SEQ ID NO: 11280 - DNA, 20 bp, Artificial Sequence
  Synthetic: descartes_7193_NTC
ctgcctagggattcctgtga

SEQ ID NO: 11281 - DNA, 20 bp, Artificial Sequence
  Synthetic: descartes_7194_NTC
gtatattctgcctatctcgg

SEQ ID NO: 11282 - DNA, 20 bp, Artificial Sequence
  Synthetic: descartes_7195_NTC
ctcagcctgacgttcctacc

SEQ ID NO: 11283 - DNA, 20 bp, Artificial Sequence
  Synthetic: descartes_7196_NTC
acaccaataataacccttca

SEQ ID NO: 11284 - DNA, 20 bp, Artificial Sequence
  Synthetic: descartes_7197_NTC
gcagacaccaaggagctcaa

SEQ ID NO: 11285 - DNA, 20 bp, Artificial Sequence
  Synthetic: descartes_7198_NTC
cgcgagccatttacaatcgg

SEQ ID NO: 11286 - DNA, 20 bp, Artificial Sequence
  Synthetic: descartes_7199_NTC
gccggctttagcgatgtaga

SEQ ID NO: 11287 - DNA, 20 bp, Artificial Sequence
  Synthetic: descartes_7200_NTC
gcaaacgaggccggtcctcg

SEQ ID NO: 11288 - DNA, 20 bp, Artificial Sequence
  Synthetic: descartes_7201_NTC
cccccggccattcacgtatc

SEQ ID NO: 11289 - DNA, 20 bp, Artificial Sequence
  Synthetic: descartes_7202_NTC
tcaacttgcgattgtatagg

SEQ ID NO: 11290 - DNA, 20 bp, Artificial Sequence
  Synthetic: descartes_7203_NTC
gtgcgtgataactgccactt

SEQ ID NO: 11291 - DNA, 20 bp, Artificial Sequence
  Synthetic: descartes_7204_NTC
ttagagtttggctacagctt

SEQ ID NO: 11292 - DNA, 20 bp, Artificial Sequence
  Synthetic: descartes_7205_NTC
atataagagaccatcgtatc

SEQ ID NO: 11293 - DNA, 20 bp, Artificial Sequence
  Synthetic: descartes_7206_NTC
taggtgcggcgacatgggtt

SEQ ID NO: 11294 - DNA, 20 bp, Artificial Sequence
  Synthetic: descartes_7207_NTC
taagcagtcacacgggacca

SEQ ID NO: 11295 - DNA, 20 bp, Artificial Sequence
  Synthetic: descartes_7208_NTC
ccatcgcggtatctggggcg

SEQ ID NO: 11296 - DNA, 20 bp, Artificial Sequence
  Synthetic: descartes_7209_NTC
gactagtacaacactaaaag

SEQ ID NO: 11297 - DNA, 20 bp, Artificial Sequence
  Synthetic: descartes_7210_NTC
aagtctgcaatccttactaa

SEQ ID NO: 11298 - DNA, 20 bp, Artificial Sequence
  Synthetic: descartes_7211_NTC
tctcacctttactccgccca

SEQ ID NO: 11299 - DNA, 20 bp, Artificial Sequence
  Synthetic: descartes_7212_NTC
actgtatctcgagtaggctt

SEQ ID NO: 11300 - DNA, 20 bp, Artificial Sequence
  Synthetic: descartes_7213_NTC
gtgtaccgggggtaacgtct

SEQ ID NO: 11301 - DNA, 20 bp, Artificial Sequence
  Synthetic: descartes_7214_NTC
cgtgtcttactggcgccctc

SEQ ID NO: 11302 - DNA, 20 bp, Artificial Sequence
  Synthetic: descartes_7215_NTC
ctgactggcgctacatctca

SEQ ID NO: 11303 - DNA, 20 bp, Artificial Sequence
  Synthetic: descartes_7216_NTC
acggggggtattccacacgt

SEQ ID NO: 11304 - DNA, 20 bp, Artificial Sequence
  Synthetic: descartes_7217_NTC
aaaacgcacaggggttaccg

SEQ ID NO: 11305 - DNA, 20 bp, Artificial Sequence
  Synthetic: descartes_7218_NTC
tatggataatcctagcccaa

SEQ ID NO: 11306 - DNA, 20 bp, Artificial Sequence
  Synthetic: descartes_7219_NTC
gtggcctagtaggtagacga

SEQ ID NO: 11307 - DNA, 20 bp, Artificial Sequence
  Synthetic: descartes_7220_NTC
tcccagataaagtcaaattg

SEQ ID NO: 11308 - DNA, 20 bp, Artificial Sequence
  Synthetic: descartes_7221_NTC
ttgagaggccagactcaaac

SEQ ID NO: 11309 - DNA, 20 bp, Artificial Sequence
  Synthetic: descartes_7222_NTC
agcggtaccctatgcgtggg

SEQ ID NO: 11310 - DNA, 20 bp, Artificial Sequence
  Synthetic: descartes_7223_NTC
cgataaaaggctcggatacc

SEQ ID NO: 11311 - DNA, 20 bp, Artificial Sequence
  Synthetic: descartes_7224_NTC
cagcggttctttgaatgtgt

SEQ ID NO: 11312 - DNA, 20 bp, Artificial Sequence
  Synthetic: descartes_7225_NTC
tttgggcgaagacttgagga

SEQ ID NO: 11313 - DNA, 20 bp, Artificial Sequence
  Synthetic: descartes_7226_NTC
tgggaggtacagcagcgagc

SEQ ID NO: 11314 - DNA, 20 bp, Artificial Sequence
  Synthetic: descartes_7227_NTC
gccttgtctgcgcgggtact

SEQ ID NO: 11315 - DNA, 20 bp, Artificial Sequence
  Synthetic: descartes_7228_NTC
cacctgagccagcctaagcg

SEQ ID NO: 11316 - DNA, 20 bp, Artificial Sequence
  Synthetic: descartes_7229_NTC
ataagcagccaaggctctaa

SEQ ID NO: 11317 - DNA, 20 bp, Artificial Sequence
  Synthetic: descartes_7230_NTC
gtgatgaggtcctgaaaggt

SEQ ID NO: 11318 - DNA, 20 bp, Artificial Sequence
  Synthetic: descartes_7231_NTC
attgacggcccatactgctt

SEQ ID NO: 11319 - DNA, 20 bp, Artificial Sequence
  Synthetic: descartes_7232_NTC
cccacactgattttctcagc

SEQ ID NO: 11320 - DNA, 20 bp, Artificial Sequence
  Synthetic: descartes_7233_NTC
tgagttcagccggtcatcct

SEQ ID NO: 11321 - DNA, 20 bp, Artificial Sequence
  Synthetic: descartes_7234_NTC
cttgatgtctaccgatcggt

SEQ ID NO: 11322 - DNA, 20 bp, Artificial Sequence
  Synthetic: descartes_7235_NTC
ttgagcagtccagttggccc

SEQ ID NO: 11323 - DNA, 20 bp, Artificial Sequence
  Synthetic: descartes_7236_NTC
gtgataccagaacaaggcct

SEQ ID NO: 11324 - DNA, 20 bp, Artificial Sequence
  Synthetic: descartes_7237_NTC
acctcctttatctatccaat

SEQ ID NO: 11325 - DNA, 20 bp, Artificial Sequence
  Synthetic: descartes_7238_NTC
ggccaattcacagatgtcgt

SEQ ID NO: 11326 - DNA, 20 bp, Artificial Sequence
  Synthetic: descartes_7239_NTC
ggacccgtaccttgcggtag

SEQ ID NO: 11327 - DNA, 20 bp, Artificial Sequence
  Synthetic: descartes_7240_NTC
aactattgtgccgcatccta

SEQ ID NO: 11328 - DNA, 20 bp, Artificial Sequence
  Synthetic: descartes_7241_NTC
cgtcacgttacataacgccc

SEQ ID NO: 11329 - DNA, 20 bp, Artificial Sequence
  Synthetic: descartes_7242_NTC
cagacccatgggtaggctcc

SEQ ID NO: 11330 - DNA, 20 bp, Artificial Sequence
  Synthetic: descartes_7243_NTC
ccagctgcttatagctattc

SEQ ID NO: 11331 - DNA, 20 bp, Artificial Sequence
  Synthetic: descartes_7244_NTC
ttgatatctggattagcgct

SEQ ID NO: 11332 - DNA, 20 bp, Artificial Sequence
  Synthetic: descartes_7245_NTC
tcgcggaaaaaacagacacc

SEQ ID NO: 11333 - DNA, 20 bp, Artificial Sequence
  Synthetic: descartes_7246_NTC
gcgggtccacatccggagat

SEQ ID NO: 11334 - DNA, 20 bp, Artificial Sequence
  Synthetic: descartes_7247_NTC
gttctaatttgcgctccgct

SEQ ID NO: 11335 - DNA, 20 bp, Artificial Sequence
  Synthetic: descartes_7248_NTC
gttacgttctttgcagcgga

SEQ ID NO: 11336 - DNA, 20 bp, Artificial Sequence
  Synthetic: descartes_7249_NTC
ctaataataactttacgacg

SEQ ID NO: 11337 - DNA, 20 bp, Artificial Sequence
  Synthetic: descartes_7250_NTC
ggattgctgggcttggcatc

SEQ ID NO: 11338 - DNA, 20 bp, Artificial Sequence
  Synthetic: descartes_7251_NTC
ggcatgtaagtttcaagaat

SEQ ID NO: 11339 - DNA, 20 bp, Artificial Sequence
  Synthetic: descartes_7252_NTC
tcgcaaagaagtaggtagcc

SEQ ID NO: 11340 - DNA, 20 bp, Artificial Sequence
  Synthetic: descartes_7253_NTC
atacttaaggcttacctagt

SEQ ID NO: 11341 - DNA, 20 bp, Artificial Sequence
  Synthetic: descartes_7254_NTC
ccttactcataggtcttgta

SEQ ID NO: 11342 - DNA, 20 bp, Artificial Sequence
  Synthetic: descartes_7255_NTC
gtcgttgggttcatggcatc

SEQ ID NO: 11343 - DNA, 20 bp, Artificial Sequence
  Synthetic: descartes_7256_NTC
ctgccccattagtacttggc

SEQ ID NO: 11344 - DNA, 20 bp, Artificial Sequence
  Synthetic: descartes_7257_NTC
tcggacaaatggcttcacgg

SEQ ID NO: 11345 - DNA, 20 bp, Artificial Sequence
  Synthetic: descartes_7258_NTC
accgtcagtactccgtgaga

SEQ ID NO: 11346 - DNA, 20 bp, Artificial Sequence
  Synthetic: descartes_7259_NTC
acttccgacggcacctttgg

SEQ ID NO: 11347 - DNA, 20 bp, Artificial Sequence
  Synthetic: descartes_7260_NTC
cgggttgtcgttgcattcca

SEQ ID NO: 11348 - DNA, 20 bp, Artificial Sequence
  Synthetic: descartes_7261_NTC
atccgtggtcctgatggatt

SEQ ID NO: 11349 - DNA, 20 bp, Artificial Sequence
  Synthetic: descartes_7262_NTC
tgttgggtctccttattggg

SEQ ID NO: 11350 - DNA, 20 bp, Artificial Sequence
  Synthetic: descartes_7263_NTC
ggcgcagacgagctgctatt

SEQ ID NO: 11351 - DNA, 20 bp, Artificial Sequence
  Synthetic: descartes_7264_NTC
cgtcaggccttgcgggttgg

SEQ ID NO: 11352 - DNA, 20 bp, Artificial Sequence
  Synthetic: descartes_7265_NTC
tcggatgggcctcgcccgct

SEQ ID NO: 11353 - DNA, 20 bp, Artificial Sequence
  Synthetic: descartes_7266_NTC
ttgccactgactaagacgca

SEQ ID NO: 11354 - DNA, 20 bp, Artificial Sequence
  Synthetic: descartes_7267_NTC
tagcaaaacattgaatcgga

SEQ ID NO: 11355 - DNA, 20 bp, Artificial Sequence
  Synthetic: descartes_7268_NTC
catgcagactcaattcggaa

SEQ ID NO: 11356 - DNA, 20 bp, Artificial Sequence
  Synthetic: descartes_7269_NTC
tctattgtgtaaacttctgc

SEQ ID NO: 11357 - DNA, 20 bp, Artificial Sequence
  Synthetic: descartes_7270_NTC
atagtaaggtcctttgttct

SEQ ID NO: 11358 - DNA, 20 bp, Artificial Sequence
  Synthetic: descartes_7271_NTC
gagttatagagccgagtgcc

SEQ ID NO: 11359 - DNA, 20 bp, Artificial Sequence
  Synthetic: descartes_7272_NTC
ccgggtactgttcaatcgac

SEQ ID NO: 11360 - DNA, 20 bp, Artificial Sequence
  Synthetic: descartes_7273_NTC
acgacatagtaaagccagtc

SEQ ID NO: 11361 - DNA, 20 bp, Artificial Sequence
  Synthetic: descartes_7274_NTC
ttgaatcccatggtaaaacc

SEQ ID NO: 11362 - DNA, 20 bp, Artificial Sequence
  Synthetic: descartes_7275_NTC
acacccgaaataaggtggtt

SEQ ID NO: 11363 - DNA, 20 bp, Artificial Sequence
  Synthetic: descartes_7276_NTC
ctttgaaccgaagttcggcc

SEQ ID NO: 11364 - DNA, 20 bp, Artificial Sequence
  Synthetic: descartes_7277_NTC
tgcgcatccctcttcaatgc

SEQ ID NO: 11365 - DNA, 20 bp, Artificial Sequence
  Synthetic: descartes_7278_NTC
aagtggacacccgcatacag

SEQ ID NO: 11366 - DNA, 20 bp, Artificial Sequence
  Synthetic: descartes_7279_NTC
aacgcgtccagtcgaacgcg

SEQ ID NO: 11367 - DNA, 20 bp, Artificial Sequence
  Synthetic: descartes_7280_NTC
tatcaattagtttcatgtat

SEQ ID NO: 11368 - DNA, 20 bp, Artificial Sequence
  Synthetic: descartes_7281_NTC
attcgttcgtctcagagaag

SEQ ID NO: 11369 - DNA, 20 bp, Artificial Sequence
  Synthetic: descartes_7282_NTC
agtgtttgcattagtgtagt

SEQ ID NO: 11370 - DNA, 20 bp, Artificial Sequence
  Synthetic: descartes_7283_NTC
gcgagtattgctcgttttag

SEQ ID NO: 11371 - DNA, 20 bp, Artificial Sequence
  Synthetic: descartes_7284_NTC
caacactaattaaggccccc

SEQ ID NO: 11372 - DNA, 20 bp, Artificial Sequence
  Synthetic: descartes_7285_NTC
taatccggagcggtcaggga

SEQ ID NO: 11373 - DNA, 20 bp, Artificial Sequence
  Synthetic: descartes_7286_NTC
agctgagggaatttcgcgcg

SEQ ID NO: 11374 - DNA, 20 bp, Artificial Sequence
  Synthetic: descartes_7287_NTC
gggttgtccgcgggcagggg

SEQ ID NO: 11375 - DNA, 20 bp, Artificial Sequence
  Synthetic: descartes_7288_NTC
ccttttttcacagccacatt

SEQ ID NO: 11376 - DNA, 20 bp, Artificial Sequence
  Synthetic: descartes_7289_NTC
gaacatacaatcaaaagatt

SEQ ID NO: 11377 - DNA, 20 bp, Artificial Sequence
  Synthetic: descartes_7290_NTC
cactcataagaagcagatcc

SEQ ID NO: 11378 - DNA, 20 bp, Artificial Sequence
  Synthetic: descartes_7291_NTC
tattctaatctgactatctc

SEQ ID NO: 11379 - DNA, 20 bp, Artificial Sequence
  Synthetic: descartes_7292_NTC
taattccgccttggtacccg

SEQ ID NO: 11380 - DNA, 20 bp, Artificial Sequence
  Synthetic: descartes_7293_NTC
agcctgggctagctgtagtg

SEQ ID NO: 11381 - DNA, 20 bp, Artificial Sequence
  Synthetic: descartes_7294_NTC
agttccaaaaagccgctgcc

SEQ ID NO: 11382 - DNA, 20 bp, Artificial Sequence
  Synthetic: descartes_7295_NTC
tcttcgattacagcgcctcg

SEQ ID NO: 11383 - DNA, 20 bp, Artificial Sequence
  Synthetic: descartes_7296_NTC
cacatcatggtaagttgctt

SEQ ID NO: 11384 - DNA, 20 bp, Artificial Sequence
  Synthetic: descartes_7297_NTC
gccgggcgggatcaaaggtc

SEQ ID NO: 11385 - DNA, 20 bp, Artificial Sequence
  Synthetic: descartes_7298_NTC
cttctagagattgcaaagta

SEQ ID NO: 11386 - DNA, 20 bp, Artificial Sequence
  Synthetic: descartes_7299_NTC
agggcgcagctcgttagtca

SEQ ID NO: 11387 - DNA, 20 bp, Artificial Sequence
  Synthetic: descartes_7300_NTC
atatgggacgaactagatga

SEQ ID NO: 11388 - DNA, 20 bp, Artificial Sequence
  Synthetic: descartes_7301_NTC
tagccaacaccgtacataac

SEQ ID NO: 11389 - DNA, 20 bp, Artificial Sequence
  Synthetic: descartes_7302_NTC
aagagcattgcccgggctgt

SEQ ID NO: 11390 - DNA, 20 bp, Artificial Sequence
  Synthetic: descartes_7303_NTC
gatacttgtttccaaagttc

SEQ ID NO: 11391 - DNA, 20 bp, Artificial Sequence
  Synthetic: descartes_7304_NTC
gagaatgatccccttacgag

SEQ ID NO: 11392 - DNA, 20 bp, Artificial Sequence
  Synthetic: descartes_7305_NTC
gtcttgtactagcctgaagg

SEQ ID NO: 11393 - DNA, 20 bp, Artificial Sequence
  Synthetic: descartes_7306_NTC
cacacattctcgctgtcggc

SEQ ID NO: 11394 - DNA, 20 bp, Artificial Sequence
  Synthetic: descartes_7307_NTC
gtgtactattgggctctgcc

SEQ ID NO: 11395 - DNA, 20 bp, Artificial Sequence
  Synthetic: descartes_7308_NTC
tgtcttgaccctggcgaatg

SEQ ID NO: 11396 - DNA, 20 bp, Artificial Sequence
  Synthetic: descartes_7309_NTC
tcgtgcatccacggtgtctt

SEQ ID NO: 11397 - DNA, 20 bp, Artificial Sequence
  Synthetic: descartes_7310_NTC
gtatgcttttgtgtagtaga

SEQ ID NO: 11398 - DNA, 20 bp, Artificial Sequence
  Synthetic: descartes_7311_NTC
agtctcctctgtgtggagtc

SEQ ID NO: 11399 - DNA, 20 bp, Artificial Sequence
  Synthetic: descartes_7312_NTC
acaaataagaagcttcagac

SEQ ID NO: 11400 - DNA, 20 bp, Artificial Sequence
  Synthetic: descartes_7313_NTC
cgtagctaccgccctcctgg

SEQ ID NO: 11401 - DNA, 20 bp, Artificial Sequence
  Synthetic: descartes_7314_NTC
aagtcgcgagtagaaggcga

SEQ ID NO: 11402 - DNA, 20 bp, Artificial Sequence
  Synthetic: descartes_7315_NTC
ggtcggggagtcatccactt

SEQ ID NO: 11403 - DNA, 20 bp, Artificial Sequence
  Synthetic: descartes_7316_NTC
tctttggcaaaacctcgact

SEQ ID NO: 11404 - DNA, 20 bp, Artificial Sequence
  Synthetic: descartes_7317_NTC
gtggccccaacatccatcta

SEQ ID NO: 11405 - DNA, 20 bp, Artificial Sequence
  Synthetic: descartes_7318_NTC
ccgtgcattgccatcagata

SEQ ID NO: 11406 - DNA, 20 bp, Artificial Sequence
  Synthetic: descartes_7319_NTC
gagtgtatgatcagagtcct

SEQ ID NO: 11407 - DNA, 20 bp, Artificial Sequence
  Synthetic: descartes_7320_NTC
tatcgaccgatagctggact

SEQ ID NO: 11408 - DNA, 20 bp, Artificial Sequence
  Synthetic: descartes_7321_NTC
agtaccgtgtgttggacctt

SEQ ID NO: 11409 - DNA, 20 bp, Artificial Sequence
  Synthetic: descartes_7322_NTC
gttgggagatcctcatggag

SEQ ID NO: 11410 - DNA, 20 bp, Artificial Sequence
  Synthetic: descartes_7323_NTC
agagatgcggtacactcaca

SEQ ID NO: 11411 - DNA, 20 bp, Artificial Sequence
  Synthetic: descartes_7324_NTC
atggtaaaatggccccgaac

SEQ ID NO: 11412 - DNA, 20 bp, Artificial Sequence
  Synthetic: descartes_7325_NTC
gccagtgagccgtcttctgt

SEQ ID NO: 11413 - DNA, 20 bp, Artificial Sequence
  Synthetic: descartes_7326_NTC
ttctaccaaccgatgtgcag

SEQ ID NO: 11414 - DNA, 20 bp, Artificial Sequence
  Synthetic: descartes_7327_NTC
gtgagctatctgtcaaccga

SEQ ID NO: 11415 - DNA, 20 bp, Artificial Sequence
  Synthetic: descartes_7328_NTC
tgccagatgattacggtaga

SEQ ID NO: 11416 - DNA, 20 bp, Artificial Sequence
  Synthetic: descartes_7329_NTC
tccgctgttgacggatactg

SEQ ID NO: 11417 - DNA, 20 bp, Artificial Sequence
  Synthetic: descartes_7330_NTC
aattcactacggcaataaca

SEQ ID NO: 11418 - DNA, 20 bp, Artificial Sequence
  Synthetic: descartes_7331_NTC
gcccacgggtgtgcctcggt

SEQ ID NO: 11419 - DNA, 20 bp, Artificial Sequence
  Synthetic: descartes_7332_NTC
aagtcggtctttgctttgat

SEQ ID NO: 11420 - DNA, 20 bp, Artificial Sequence
  Synthetic: descartes_7333_NTC
ctgtatggagtgttttgggt

SEQ ID NO: 11421 - DNA, 20 bp, Artificial Sequence
  Synthetic: descartes_7334_NTC
tattataaatcaaactacgt

SEQ ID NO: 11422 - DNA, 20 bp, Artificial Sequence
  Synthetic: descartes_7335_NTC
aacccgcggatgcgaatgtg

SEQ ID NO: 11423 - DNA, 20 bp, Artificial Sequence
  Synthetic: descartes_7336_NTC
tcgtggggcattcaagaatt

SEQ ID NO: 11424 - DNA, 20 bp, Artificial Sequence
  Synthetic: descartes_7337_NTC
tccactcaaacagcacaaac

SEQ ID NO: 11425 - DNA, 20 bp, Artificial Sequence
  Synthetic: descartes_7338_NTC
tcaataagggacagctgacc

SEQ ID NO: 11426 - DNA, 20 bp, Artificial Sequence
  Synthetic: descartes_7339_NTC
cctttatacgggtcctcaat

SEQ ID NO: 11427 - DNA, 20 bp, Artificial Sequence
  Synthetic: descartes_7340_NTC
tattttctcgtcatagtagc

SEQ ID NO: 11428 - DNA, 20 bp, Artificial Sequence
  Synthetic: descartes_7341_NTC
tcgtcaatccatcctccggg

SEQ ID NO: 11429 - DNA, 20 bp, Artificial Sequence
  Synthetic: descartes_7342_NTC
gtctattccaagttggtgcg

SEQ ID NO: 11430 - DNA, 20 bp, Artificial Sequence
  Synthetic: descartes_7343_NTC
ttcgaatctgagggtcggtt

SEQ ID NO: 11431 - DNA, 20 bp, Artificial Sequence
  Synthetic: descartes_7344_NTC
catcagtaaaatgtcattcc

SEQ ID NO: 11432 - DNA, 20 bp, Artificial Sequence
  Synthetic: descartes_7345_NTC
tcgcgtcactgaacgaaata

SEQ ID NO: 11433 - DNA, 20 bp, Artificial Sequence
  Synthetic: descartes_7346_NTC
cgggatacgtgtaaggcggg

SEQ ID NO: 11434 - DNA, 20 bp, Artificial Sequence
  Synthetic: descartes_7347_NTC
tcgcccgcgtaggcctgtgc

SEQ ID NO: 11435 - DNA, 20 bp, Artificial Sequence
  Synthetic: descartes_7348_NTC
ttcagctctgaccagcaact

SEQ ID NO: 11436 - DNA, 20 bp, Artificial Sequence
  Synthetic: descartes_7349_NTC
ttaatcggcggtgcttggaa

SEQ ID NO: 11437 - DNA, 20 bp, Artificial Sequence
  Synthetic: descartes_7350_NTC
gaaagctttcgcttgtttcg

SEQ ID NO: 11438 - DNA, 20 bp, Artificial Sequence
  Synthetic: descartes_7351_NTC
gaggaaagagggtagctatc

SEQ ID NO: 11439 - DNA, 20 bp, Artificial Sequence
  Synthetic: descartes_7352_NTC
tctggccgtctccgaagcat

SEQ ID NO: 11440 - DNA, 20 bp, Artificial Sequence
  Synthetic: descartes_7353_NTC
aggctgctggtactcgtcaa

SEQ ID NO: 11441 - DNA, 20 bp, Artificial Sequence
  Synthetic: descartes_7354_NTC
aacccggtctgtgcagccat

SEQ ID NO: 11442 - DNA, 20 bp, Artificial Sequence
  Synthetic: descartes_7355_NTC
gtattaccagatgcggttat

SEQ ID NO: 11443 - DNA, 20 bp, Artificial Sequence
  Synthetic: descartes_7356_NTC
cgatgcaggtccgtcccccc

SEQ ID NO: 11444 - DNA, 20 bp, Artificial Sequence
  Synthetic: descartes_7357_NTC
gaggaaatgtgagatcgtcc

SEQ ID NO: 11445 - DNA, 20 bp, Artificial Sequence
  Synthetic: descartes_7358_NTC
attcaatgaccccgatgtgc

SEQ ID NO: 11446 - DNA, 20 bp, Artificial Sequence
  Synthetic: descartes_7359_NTC
aggaaacacccgaataggtt

SEQ ID NO: 11447 - DNA, 20 bp, Artificial Sequence
  Synthetic: descartes_7360_NTC
ccccccctgtgcgagcggcg

SEQ ID NO: 11448 - DNA, 20 bp, Artificial Sequence
  Synthetic: descartes_7361_NTC
ttttagcttgaagatatctt

SEQ ID NO: 11449 - DNA, 20 bp, Artificial Sequence
  Synthetic: descartes_7362_NTC
gacggatcggctggtaggtg

SEQ ID NO: 11450 - DNA, 20 bp, Artificial Sequence
  Synthetic: descartes_7363_NTC
ccattctggatttttatttc

SEQ ID NO: 11451 - DNA, 20 bp, Artificial Sequence
  Synthetic: descartes_7364_NTC
ccgtaggaccgggagaggag

SEQ ID NO: 11452 - DNA, 20 bp, Artificial Sequence
  Synthetic: descartes_7365_NTC
ttgacacgattatctatgat

SEQ ID NO: 11453 - DNA, 20 bp, Artificial Sequence
  Synthetic: descartes_7366_NTC
gggatgctctatcttctgat

SEQ ID NO: 11454 - DNA, 20 bp, Artificial Sequence
  Synthetic: descartes_7367_NTC
ctgttagaacattacttaat

SEQ ID NO: 11455 - DNA, 20 bp, Artificial Sequence
  Synthetic: descartes_7368_NTC
ctcccctctatccctccagg

SEQ ID NO: 11456 - DNA, 20 bp, Artificial Sequence
  Synthetic: descartes_7369_NTC
cacaataaccttagcataaa

SEQ ID NO: 11457 - DNA, 20 bp, Artificial Sequence
  Synthetic: descartes_7370_NTC
attgtatggctaattggctc

SEQ ID NO: 11458 - DNA, 20 bp, Artificial Sequence
  Synthetic: descartes_7371_NTC
agtcggccagacacatgctt

SEQ ID NO: 11459 - DNA, 20 bp, Artificial Sequence
  Synthetic: descartes_7372_NTC
cttgtgcccaggtcggcctt

SEQ ID NO: 11460 - DNA, 20 bp, Artificial Sequence
  Synthetic: descartes_7373_NTC
tatgccgaagacaggctatc

SEQ ID NO: 11461 - DNA, 20 bp, Artificial Sequence
  Synthetic: descartes_7374_NTC
gtgcctctgaaattaaacca

SEQ ID NO: 11462 - DNA, 20 bp, Artificial Sequence
  Synthetic: descartes_7375_NTC
attgagaggcgatctctttc

SEQ ID NO: 11463 - DNA, 20 bp, Artificial Sequence
  Synthetic: descartes_7376_NTC
aacatatatagggtcgttga

SEQ ID NO: 11464 - DNA, 20 bp, Artificial Sequence
  Synthetic: descartes_7377_NTC
actattcgccagccgctggc

SEQ ID NO: 11465 - DNA, 20 bp, Artificial Sequence
  Synthetic: descartes_7378_NTC
catctaggtttgcactgggt

SEQ ID NO: 11466 - DNA, 20 bp, Artificial Sequence
  Synthetic: descartes_7379_NTC
catgtctatcctggtgggct

SEQ ID NO: 11467 - DNA, 20 bp, Artificial Sequence
  Synthetic: descartes_7380_NTC
gctataccgtgccggtcgga

SEQ ID NO: 11468 - DNA, 20 bp, Artificial Sequence
  Synthetic: descartes_7381_NTC
tatatgcacttgtccctcat

SEQ ID NO: 11469 - DNA, 20 bp, Artificial Sequence
  Synthetic: descartes_7382_NTC
cccatcgaatgcggcgcgtc

SEQ ID NO: 11470 - DNA, 20 bp, Artificial Sequence
  Synthetic: descartes_7383_NTC
gtctccggtatctggagggg

SEQ ID NO: 11471 - DNA, 20 bp, Artificial Sequence
  Synthetic: descartes_7384_NTC
ctcatgatccacatagacaa

SEQ ID NO: 11472 - DNA, 20 bp, Artificial Sequence
  Synthetic: descartes_7385_NTC
aataatcgtatagggtgcat

SEQ ID NO: 11473 - DNA, 20 bp, Artificial Sequence
  Synthetic: descartes_7386_NTC
ttaatagtgttccacgtacc

SEQ ID NO: 11474 - DNA, 20 bp, Artificial Sequence
  Synthetic: descartes_7387_NTC
gtactaacgtgtgtaagatg

SEQ ID NO: 11475 - DNA, 20 bp, Artificial Sequence
  Synthetic: descartes_7388_NTC
gcaaaagtagttcagctgga

SEQ ID NO: 11476 - DNA, 20 bp, Artificial Sequence
  Synthetic: descartes_7389_NTC
ccccgagagttactcttcat

SEQ ID NO: 11477 - DNA, 20 bp, Artificial Sequence
  Synthetic: descartes_7390_NTC
acttttgcagggagcattaa

SEQ ID NO: 11478 - DNA, 20 bp, Artificial Sequence
  Synthetic: descartes_7391_NTC
gctggcgaagtctcaatccg

SEQ ID NO: 11479 - DNA, 20 bp, Artificial Sequence
  Synthetic: descartes_7392_NTC
tttttggcgcgcagttgtca

SEQ ID NO: 11480 - DNA, 20 bp, Artificial Sequence
  Synthetic: descartes_7393_NTC
cgaatgagggcagttgatcc

SEQ ID NO: 11481 - DNA, 20 bp, Artificial Sequence
  Synthetic: descartes_7394_NTC
gtctcctaaaggtgtatgcg

SEQ ID NO: 11482 - DNA, 20 bp, Artificial Sequence
  Synthetic: descartes_7395_NTC
gaagggtcgtcgatcaggag

SEQ ID NO: 11483 - DNA, 20 bp, Artificial Sequence
  Synthetic: descartes_7396_NTC
cacgccattcgttgattgga

SEQ ID NO: 11484 - DNA, 20 bp, Artificial Sequence
  Synthetic: descartes_7397_NTC
ttgtttcaagaaagtacgcc

SEQ ID NO: 11485 - DNA, 20 bp, Artificial Sequence
  Synthetic: descartes_7398_NTC
gctctatgctgcgaataggt

SEQ ID NO: 11486 - DNA, 20 bp, Artificial Sequence
  Synthetic: descartes_7399_NTC
tgaggtgtcccacaagtttc

SEQ ID NO: 11487 - DNA, 20 bp, Artificial Sequence
  Synthetic: descartes_7400_NTC
gtcgtgtgattcaatggttg

SEQ ID NO: 11488 - DNA, 20 bp, Artificial Sequence
  Synthetic: descartes_7401_NTC
cagcgacggcccggtgtgtg

SEQ ID NO: 11489 - DNA, 20 bp, Artificial Sequence
  Synthetic: descartes_7402_NTC
attgattttagagggcgtga

SEQ ID NO: 11490 - DNA, 20 bp, Artificial Sequence
  Synthetic: descartes_7403_NTC
attgattgcctcagttgacg

SEQ ID NO: 11491 - DNA, 20 bp, Artificial Sequence
  Synthetic: descartes_7404_NTC
atttcaaagcctgttttgat

SEQ ID NO: 11492 - DNA, 20 bp, Artificial Sequence
  Synthetic: descartes_7405_NTC
cggataggatgtaaccatca

SEQ ID NO: 11493 - DNA, 20 bp, Artificial Sequence
  Synthetic: descartes_7406_NTC
aaggacatgatagtttacac

SEQ ID NO: 11494 - DNA, 20 bp, Artificial Sequence
  Synthetic: descartes_7407_NTC
agttgggagagcctacggga

SEQ ID NO: 11495 - DNA, 20 bp, Artificial Sequence
  Synthetic: descartes_7408_NTC
cacgaccacctgattttagt

SEQ ID NO: 11496 - DNA, 20 bp, Artificial Sequence
  Synthetic: descartes_7409_NTC
atcggttacacattatagcg

SEQ ID NO: 11497 - DNA, 20 bp, Artificial Sequence
  Synthetic: descartes_7410_NTC
gctaggaaagtgtgtcatga

SEQ ID NO: 11498 - DNA, 20 bp, Artificial Sequence
  Synthetic: descartes_7411_NTC
caccaccgagacgtcggtag

SEQ ID NO: 11499 - DNA, 20 bp, Artificial Sequence
  Synthetic: descartes_7412_NTC
tgaataaaataacctgcatt

SEQ ID NO: 11500 - DNA, 20 bp, Artificial Sequence
  Synthetic: descartes_7413_NTC
ccagagagtgatgtcgctaa

SEQ ID NO: 11501 - DNA, 20 bp, Artificial Sequence
  Synthetic: descartes_7414_NTC
gactgccgggactagccccc

SEQ ID NO: 11502 - DNA, 20 bp, Artificial Sequence
  Synthetic: descartes_7415_NTC
agatgacaacaggcggatcg

SEQ ID NO: 11503 - DNA, 20 bp, Artificial Sequence
  Synthetic: descartes_7416_NTC
ctctacgctcgacaatggtt

SEQ ID NO: 11504 - DNA, 20 bp, Artificial Sequence
  Synthetic: descartes_7417_NTC
ttttaaaggtcttagtcatt

SEQ ID NO: 11505 - DNA, 20 bp, Artificial Sequence
  Synthetic: descartes_7418_NTC
gctgcgaagataaacgcact

SEQ ID NO: 11506 - DNA, 20 bp, Artificial Sequence
  Synthetic: descartes_7419_NTC
agggtatcctgacgttgaca

SEQ ID NO: 11507 - DNA, 20 bp, Artificial Sequence
  Synthetic: descartes_7420_NTC
cttcagcatccgggccctca

SEQ ID NO: 11508 - DNA, 20 bp, Artificial Sequence
  Synthetic: descartes_7421_NTC
tttttaccgtatacaggcgt

SEQ ID NO: 11509 - DNA, 20 bp, Artificial Sequence
  Synthetic: descartes_7422_NTC
aaaagcctcttcatgaccaa

SEQ ID NO: 11510 - DNA, 20 bp, Artificial Sequence
  Synthetic: descartes_7423_NTC
accttagcattcctattgtt

SEQ ID NO: 11511 - DNA, 20 bp, Artificial Sequence
  Synthetic: descartes_7424_NTC
aggcacattagtatggccgt

SEQ ID NO: 11512 - DNA, 20 bp, Artificial Sequence
  Synthetic: descartes_7425_NTC
ttacttataacagcctgcac

SEQ ID NO: 11513 - DNA, 20 bp, Artificial Sequence
  Synthetic: descartes_7426_NTC
ccgtatcaggtgctttgcgc

SEQ ID NO: 11514 - DNA, 20 bp, Artificial Sequence
  Synthetic: descartes_7427_NTC
agagaatgtgcttgaatacg

SEQ ID NO: 11515 - DNA, 20 bp, Artificial Sequence
  Synthetic: descartes_7428_NTC
cccacgagaatgtattgcaa

SEQ ID NO: 11516 - DNA, 20 bp, Artificial Sequence
  Synthetic: descartes_7429_NTC
gccagtgcaagcagcctcgc

SEQ ID NO: 11517 - DNA, 20 bp, Artificial Sequence
  Synthetic: descartes_7430_NTC
aagtcattagctcaggacga

SEQ ID NO: 11518 - DNA, 20 bp, Artificial Sequence
  Synthetic: descartes_7431_NTC
atcacgtgcttcacaccagg

SEQ ID NO: 11519 - DNA, 20 bp, Artificial Sequence
  Synthetic: descartes_7432_NTC
gtatctttataatcgtcctg

SEQ ID NO: 11520 - DNA, 20 bp, Artificial Sequence
  Synthetic: descartes_7433_NTC
tgccgtccggagtcacagaa

SEQ ID NO: 11521 - DNA, 20 bp, Artificial Sequence
  Synthetic: descartes_7434_NTC
atagtcccaccgggcttgta

SEQ ID NO: 11522 - DNA, 20 bp, Artificial Sequence
  Synthetic: descartes_7435_NTC
ctaccttctgctatcatgtc

SEQ ID NO: 11523 - DNA, 20 bp, Artificial Sequence
  Synthetic: descartes_7436_NTC
taacccacggggaacgttct

SEQ ID NO: 11524 - DNA, 20 bp, Artificial Sequence
  Synthetic: descartes_7437_NTC
ctcagatggtaggctcgagc

SEQ ID NO: 11525 - DNA, 20 bp, Artificial Sequence
  Synthetic: descartes_7438_NTC
atctgcgcgcgctagaagcg

SEQ ID NO: 11526 - DNA, 20 bp, Artificial Sequence
  Synthetic: descartes_7439_NTC
ctcgcgggggaaaatccaac

SEQ ID NO: 11527 - DNA, 20 bp, Artificial Sequence
  Synthetic: descartes_7440_NTC
ggaactatgatttccagatt

SEQ ID NO: 11528 - DNA, 20 bp, Artificial Sequence
  Synthetic: descartes_7441_NTC
gcgataattattcgtagcac

SEQ ID NO: 11529 - DNA, 20 bp, Artificial Sequence
  Synthetic: descartes_7442_NTC
ttcgttgctgtctttaccag

SEQ ID NO: 11530 - DNA, 20 bp, Artificial Sequence
  Synthetic: descartes_7443_NTC
gggtattcggtcaaaagccc

SEQ ID NO: 11531 - DNA, 20 bp, Artificial Sequence
  Synthetic: descartes_7444_NTC
cccatcctaaaggctgctcc

SEQ ID NO: 11532 - DNA, 20 bp, Artificial Sequence
  Synthetic: descartes_7445_NTC
gacgtttaccgttgccggtt

SEQ ID NO: 11533 - DNA, 20 bp, Artificial Sequence
  Synthetic: descartes_7446_NTC
tacaagcccggcttcagggg

SEQ ID NO: 11534 - DNA, 20 bp, Artificial Sequence
  Synthetic: descartes_7447_NTC
tacggcatattgttcagtct

SEQ ID NO: 11535 - DNA, 20 bp, Artificial Sequence
  Synthetic: descartes_7448_NTC
cttcaacaactagtcaagga

SEQ ID NO: 11536 - DNA, 20 bp, Artificial Sequence
  Synthetic: descartes_7449_NTC
accagtcgtgtgccttagca

SEQ ID NO: 11537 - DNA, 20 bp, Artificial Sequence
  Synthetic: descartes_7450_NTC
cagattgggctacaagccgg

SEQ ID NO: 11538 - DNA, 20 bp, Artificial Sequence
  Synthetic: descartes_7451_NTC
gccacactcgccgaaagccg

SEQ ID NO: 11539 - DNA, 20 bp, Artificial Sequence
  Synthetic: descartes_7452_NTC
cacccgctttttcacctgcg

SEQ ID NO: 11540 - DNA, 20 bp, Artificial Sequence
  Synthetic: descartes_7453_NTC
tctgcttgcgtctagctagc

SEQ ID NO: 11541 - DNA, 20 bp, Artificial Sequence
  Synthetic: descartes_7454_NTC
tacttcgtcgtacgggatgt

SEQ ID NO: 11542 - DNA, 20 bp, Artificial Sequence
  Synthetic: descartes_7455_NTC
tcctagctccggcggtagcc

SEQ ID NO: 11543 - DNA, 20 bp, Artificial Sequence
  Synthetic: descartes_7456_NTC
gagcagaagtagagtaggtc

SEQ ID NO: 11544 - DNA, 20 bp, Artificial Sequence
  Synthetic: descartes_7457_NTC
atggtggctcgccgcccgag

SEQ ID NO: 11545 - DNA, 20 bp, Artificial Sequence
  Synthetic: descartes_7458_NTC
cgaggatgtattaagatacg

SEQ ID NO: 11546 - DNA, 20 bp, Artificial Sequence
  Synthetic: descartes_7459_NTC
gggtggtcgtcagctatgta

SEQ ID NO: 11547 - DNA, 20 bp, Artificial Sequence
  Synthetic: descartes_7460_NTC
agtggccatttcccagactc

SEQ ID NO: 11548 - DNA, 20 bp, Artificial Sequence
  Synthetic: descartes_7461_NTC
gtgttgtctcaggcgtttca

SEQ ID NO: 11549 - DNA, 20 bp, Artificial Sequence
  Synthetic: descartes_7462_NTC
aggctatcccgaggggcccg

SEQ ID NO: 11550 - DNA, 20 bp, Artificial Sequence
  Synthetic: descartes_7463_NTC
cctagtgagcattgagtttt

SEQ ID NO: 11551 - DNA, 20 bp, Artificial Sequence
  Synthetic: descartes_7464_NTC
gggttaatgtcccgataccg

SEQ ID NO: 11552 - DNA, 20 bp, Artificial Sequence
  Synthetic: descartes_7465_NTC
tatacaggggtctcgtagcg

SEQ ID NO: 11553 - DNA, 20 bp, Artificial Sequence
  Synthetic: descartes_7466_NTC
gcgcttatcgtgtcattgga

SEQ ID NO: 11554 - DNA, 20 bp, Artificial Sequence
  Synthetic: descartes_7467_NTC
gatagtccgccacctcccgc

SEQ ID NO: 11555 - DNA, 20 bp, Artificial Sequence
  Synthetic: descartes_7468_NTC
agctgatgttcggaagctcc

SEQ ID NO: 11556 - DNA, 20 bp, Artificial Sequence
  Synthetic: descartes_7469_NTC
cggttacagccggccacagc

SEQ ID NO: 11557 - DNA, 20 bp, Artificial Sequence
  Synthetic: descartes_7470_NTC
cttgatgtacgcgcgggttc

SEQ ID NO: 11558 - DNA, 20 bp, Artificial Sequence
  Synthetic: descartes_7471_NTC
tgacttatttatcactaccc

SEQ ID NO: 11559 - DNA, 20 bp, Artificial Sequence
  Synthetic: descartes_7472_NTC
aggaatttgatagtcgaaat

SEQ ID NO: 11560 - DNA, 20 bp, Artificial Sequence
  Synthetic: descartes_7473_NTC
aagatacagcgtcgcgtgcc

SEQ ID NO: 11561 - DNA, 20 bp, Artificial Sequence
  Synthetic: descartes_7474_NTC
aaggccatttcagttaaatg

SEQ ID NO: 11562 - DNA, 20 bp, Artificial Sequence
  Synthetic: descartes_7475_NTC
aaggtcattgcgtaagcggc

SEQ ID NO: 11563 - DNA, 20 bp, Artificial Sequence
  Synthetic: descartes_7476_NTC
agttcagccaatcccctcta

SEQ ID NO: 11564 - DNA, 20 bp, Artificial Sequence
  Synthetic: descartes_7477_NTC
cccctcgagcggcagccgat

SEQ ID NO: 11565 - DNA, 20 bp, Artificial Sequence
  Synthetic: descartes_7478_NTC
cagcggggggtcttaattgt

SEQ ID NO: 11566 - DNA, 20 bp, Artificial Sequence
  Synthetic: descartes_7479_NTC
cagttaaccgtgcgttaagt

SEQ ID NO: 11567 - DNA, 20 bp, Artificial Sequence
  Synthetic: descartes_7480_NTC
tccggagactctcagtgcca

SEQ ID NO: 11568 - DNA, 20 bp, Artificial Sequence
  Synthetic: descartes_7481_NTC
gactaatcactagacatgat

SEQ ID NO: 11569 - DNA, 20 bp, Artificial Sequence
  Synthetic: descartes_7482_NTC
accgagcggggacacacctg

SEQ ID NO: 11570 - DNA, 20 bp, Artificial Sequence
  Synthetic: descartes_7483_NTC
aacgcaagtgggtttcattg

SEQ ID NO: 11571 - DNA, 20 bp, Artificial Sequence
  Synthetic: descartes_7484_NTC
atctgcttaattatactagg

SEQ ID NO: 11572 - DNA, 20 bp, Artificial Sequence
  Synthetic: descartes_7485_NTC
atggatgtcccgcttgtttg

SEQ ID NO: 11573 - DNA, 20 bp, Artificial Sequence
  Synthetic: descartes_7486_NTC
tcattgcactccgccctaac

SEQ ID NO: 11574 - DNA, 20 bp, Artificial Sequence
  Synthetic: descartes_7487_NTC
taaggtttatcgccaggatg

SEQ ID NO: 11575 - DNA, 20 bp, Artificial Sequence
  Synthetic: descartes_7488_NTC
ttacgagctcgcgctctcgg

SEQ ID NO: 11576 - DNA, 20 bp, Artificial Sequence
  Synthetic: descartes_7489_NTC
tccacaaaaatttcctccgc

SEQ ID NO: 11577 - DNA, 20 bp, Artificial Sequence
  Synthetic: descartes_7490_NTC
ttgactgccactgaacgccc

SEQ ID NO: 11578 - DNA, 20 bp, Artificial Sequence
  Synthetic: descartes_7491_NTC
gtgagtgggcattttcacgt

SEQ ID NO: 11579 - DNA, 20 bp, Artificial Sequence
  Synthetic: descartes_7492_NTC
tgcacctttagatgcagagg

SEQ ID NO: 11580 - DNA, 20 bp, Artificial Sequence
  Synthetic: descartes_7493_NTC
cagaatggcagcagaatgtt

SEQ ID NO: 11581 - DNA, 20 bp, Artificial Sequence
  Synthetic: descartes_7494_NTC
ctactcgcctgtcaagtgta

SEQ ID NO: 11582 - DNA, 20 bp, Artificial Sequence
  Synthetic: descartes_7495_NTC
tactggtaacctgggaacgc

SEQ ID NO: 11583 - DNA, 20 bp, Artificial Sequence
  Synthetic: descartes_7496_NTC
caggtatactaggaggggtc

SEQ ID NO: 11584 - DNA, 20 bp, Artificial Sequence
  Synthetic: descartes_7497_NTC
gttagcgagttacaaactga

SEQ ID NO: 11585 - DNA, 20 bp, Artificial Sequence
  Synthetic: descartes_7498_NTC
cttgcaatgcctagcacgct

SEQ ID NO: 11586 - DNA, 20 bp, Artificial Sequence
  Synthetic: descartes_7499_NTC
cgacgcggctacccatgcca

SEQ ID NO: 11587 - DNA, 20 bp, Artificial Sequence
  Synthetic: descartes_7500_NTC
cagttacttggattatccag

SEQ ID NO: 11588 - DNA, 20 bp, Artificial Sequence
  Synthetic: descartes_7501_NTC
gaaaaccaagcccccgaaca

SEQ ID NO: 11589 - DNA, 20 bp, Artificial Sequence
  Synthetic: descartes_7502_NTC
ataataagcagaaacgcata

SEQ ID NO: 11590 - DNA, 20 bp, Artificial Sequence
  Synthetic: descartes_7503_NTC
tgtagtccggtaggcaaaaa

SEQ ID NO: 11591 - DNA, 20 bp, Artificial Sequence
  Synthetic: descartes_7504_NTC
ctcttacattagtcatgtat

SEQ ID NO: 11592 - DNA, 20 bp, Artificial Sequence
  Synthetic: descartes_7505_NTC
tagcctagccaaattgtgag

SEQ ID NO: 11593 - DNA, 20 bp, Artificial Sequence
  Synthetic: descartes_7506_NTC
agacaacttcttcgctgcaa

SEQ ID NO: 11594 - DNA, 20 bp, Artificial Sequence
  Synthetic: descartes_7507_NTC
tgatcagtcccttcgactac

SEQ ID NO: 11595 - DNA, 20 bp, Artificial Sequence
  Synthetic: descartes_7508_NTC
tgctaatacacggccaagcc

SEQ ID NO: 11596 - DNA, 20 bp, Artificial Sequence
  Synthetic: descartes_7509_NTC
atagtcgttgtaataatccc

SEQ ID NO: 11597 - DNA, 20 bp, Artificial Sequence
  Synthetic: descartes_7510_NTC
tttatctaggaataccgacc

SEQ ID NO: 11598 - DNA, 20 bp, Artificial Sequence
  Synthetic: descartes_7511_NTC
aatccggcatatacctacgc

SEQ ID NO: 11599 - DNA, 20 bp, Artificial Sequence
  Synthetic: descartes_7512_NTC
tgatctcatcgtgtagctta

SEQ ID NO: 11600 - DNA, 20 bp, Artificial Sequence
  Synthetic: descartes_7513_NTC
ttgaacggatcctgaacgcg

SEQ ID NO: 11601 - DNA, 20 bp, Artificial Sequence
  Synthetic: descartes_7514_NTC
cgacacgatacacgttcttt

SEQ ID NO: 11602 - DNA, 20 bp, Artificial Sequence
  Synthetic: descartes_7515_NTC
tgccctggtacatcgtttca

SEQ ID NO: 11603 - DNA, 20 bp, Artificial Sequence
  Synthetic: descartes_7516_NTC
aaaagatgcataccttgcca

SEQ ID NO: 11604 - DNA, 20 bp, Artificial Sequence
  Synthetic: descartes_7517_NTC
actcagaagcatatcaaaaa

SEQ ID NO: 11605 - DNA, 20 bp, Artificial Sequence
  Synthetic: descartes_7518_NTC
ggcggaacgacccactcata

SEQ ID NO: 11606 - DNA, 20 bp, Artificial Sequence
  Synthetic: descartes_7519_NTC
gccaccttcccgggttgcga

SEQ ID NO: 11607 - DNA, 20 bp, Artificial Sequence
  Synthetic: descartes_7520_NTC
cctactccggaccgttaaag

SEQ ID NO: 11608 - DNA, 20 bp, Artificial Sequence
  Synthetic: descartes_7521_NTC
cgcggactcttcccgattat

SEQ ID NO: 11609 - DNA, 20 bp, Artificial Sequence
  Synthetic: descartes_7522_NTC
agctgatacattgaagaaag

SEQ ID NO: 11610 - DNA, 20 bp, Artificial Sequence
  Synthetic: descartes_7523_NTC
tcaacgagccgctatgcctg

SEQ ID NO: 11611 - DNA, 20 bp, Artificial Sequence
  Synthetic: descartes_7524_NTC
ttgagtagcctactactaat

SEQ ID NO: 11612 - DNA, 20 bp, Artificial Sequence
  Synthetic: descartes_7525_NTC
cacggcccatgggtagggca

SEQ ID NO: 11613 - DNA, 20 bp, Artificial Sequence
  Synthetic: descartes_7526_NTC
gggagggcaagagctcttga

SEQ ID NO: 11614 - DNA, 20 bp, Artificial Sequence
  Synthetic: descartes_7527_NTC
aaactgggccccgacggtta

SEQ ID NO: 11615 - DNA, 20 bp, Artificial Sequence
  Synthetic: descartes_7528_NTC
gatcggctccgaactcgttt

SEQ ID NO: 11616 - DNA, 20 bp, Artificial Sequence
  Synthetic: descartes_7529_NTC
agagatataaaccgtcttcg

SEQ ID NO: 11617 - DNA, 20 bp, Artificial Sequence
  Synthetic: descartes_7530_NTC
cgcgtagcaacgcgatagcg

SEQ ID NO: 11618 - DNA, 20 bp, Artificial Sequence
  Synthetic: descartes_7531_NTC
aaagcacatttgatgaataa

SEQ ID NO: 11619 - DNA, 20 bp, Artificial Sequence
  Synthetic: descartes_7532_NTC
ctgcgagctcttaacatcag

SEQ ID NO: 11620 - DNA, 20 bp, Artificial Sequence
  Synthetic: descartes_7533_NTC
agcaaaggcaagctatgtct

SEQ ID NO: 11621 - DNA, 20 bp, Artificial Sequence
  Synthetic: descartes_7534_NTC
gactcgaattttgtttgact

SEQ ID NO: 11622 - DNA, 20 bp, Artificial Sequence
  Synthetic: descartes_7535_NTC
atttcgtgtcgagccctcac

SEQ ID NO: 11623 - DNA, 20 bp, Artificial Sequence
  Synthetic: descartes_7536_NTC
aataggccgttgactgacga

SEQ ID NO: 11624 - DNA, 20 bp, Artificial Sequence
  Synthetic: descartes_7537_NTC
attgggggatatatgattcg

SEQ ID NO: 11625 - DNA, 20 bp, Artificial Sequence
  Synthetic: descartes_7538_NTC
tgacctcttctggcaattaa

SEQ ID NO: 11626 - DNA, 20 bp, Artificial Sequence
  Synthetic: descartes_7539_NTC
aaggcttaacaatcactccg

SEQ ID NO: 11627 - DNA, 20 bp, Artificial Sequence
  Synthetic: descartes_7540_NTC
gaaaagagtgtgtgatctct

SEQ ID NO: 11628 - DNA, 20 bp, Artificial Sequence
  Synthetic: descartes_7541_NTC
taggcagctgggcgtccgga

SEQ ID NO: 11629 - DNA, 20 bp, Artificial Sequence
  Synthetic: descartes_7542_NTC
gacaggtgcgcaactggaag

SEQ ID NO: 11630 - DNA, 20 bp, Artificial Sequence
  Synthetic: descartes_7543_NTC
ctcccccgagcgtggaaatg

SEQ ID NO: 11631 - DNA, 20 bp, Artificial Sequence
  Synthetic: descartes_7544_NTC
gtgtgggggttcatacagaa

SEQ ID NO: 11632 - DNA, 20 bp, Artificial Sequence
  Synthetic: descartes_7545_NTC
ccctatgcacctcgatacgg

SEQ ID NO: 11633 - DNA, 20 bp, Artificial Sequence
  Synthetic: descartes_7546_NTC
tcaagacggctacgcatgaa

SEQ ID NO: 11634 - DNA, 20 bp, Artificial Sequence
  Synthetic: descartes_7547_NTC
ctgggtatatagtcgaaacc

SEQ ID NO: 11635 - DNA, 20 bp, Artificial Sequence
  Synthetic: descartes_7548_NTC
tccttagcggcattaaagat

SEQ ID NO: 11636 - DNA, 20 bp, Artificial Sequence
  Synthetic: descartes_7549_NTC
aagaataattccttggtaag

SEQ ID NO: 11637 - DNA, 20 bp, Artificial Sequence
  Synthetic: descartes_7550_NTC
cctcctattaaataggtcgt

SEQ ID NO: 11638 - DNA, 20 bp, Artificial Sequence
  Synthetic: descartes_7551_NTC
ctaaattagcgcaatcatta

SEQ ID NO: 11639 - DNA, 20 bp, Artificial Sequence
  Synthetic: descartes_7552_NTC
cgtctatgcttatgtgtctc

SEQ ID NO: 11640 - DNA, 20 bp, Artificial Sequence
  Synthetic: descartes_7553_NTC
tcggtgaacggaactgttag

SEQ ID NO: 11641 - DNA, 20 bp, Artificial Sequence
  Synthetic: descartes_7554_NTC
tagtgcgtgtgcgcccgata

SEQ ID NO: 11642 - DNA, 20 bp, Artificial Sequence
  Synthetic: descartes_7555_NTC
tagagtcggtttattcgtcg

SEQ ID NO: 11643 - DNA, 20 bp, Artificial Sequence
  Synthetic: descartes_7556_NTC
gcgacccgagagccacgtga

SEQ ID NO: 11644 - DNA, 20 bp, Artificial Sequence
  Synthetic: descartes_7557_NTC
ttatcgcgatcagacctatg

SEQ ID NO: 11645 - DNA, 20 bp, Artificial Sequence
  Synthetic: descartes_7558_NTC
ttaacgggtcagattctgga

SEQ ID NO: 11646 - DNA, 20 bp, Artificial Sequence
  Synthetic: descartes_7559_NTC
gtacggcgctcgatcgcaca

SEQ ID NO: 11647 - DNA, 20 bp, Artificial Sequence
  Synthetic: descartes_7560_NTC
ggtcgttatgaggttccggg

SEQ ID NO: 11648 - DNA, 20 bp, Artificial Sequence
  Synthetic: descartes_7561_NTC
tagcgatcgtgcagcgccct

SEQ ID NO: 11649 - DNA, 20 bp, Artificial Sequence
  Synthetic: descartes_7562_NTC
gctcaagccacctcgtcagc

SEQ ID NO: 11650 - DNA, 20 bp, Artificial Sequence
  Synthetic: descartes_7563_NTC
cgtgtcaagcacaacgttta

SEQ ID NO: 11651 - DNA, 20 bp, Artificial Sequence
  Synthetic: descartes_7564_NTC
acggaatcctttaaagcatt

SEQ ID NO: 11652 - DNA, 20 bp, Artificial Sequence
  Synthetic: descartes_7565_NTC
tagtaggcttcaatgtggat

SEQ ID NO: 11653 - DNA, 20 bp, Artificial Sequence
  Synthetic: descartes_7566_NTC
ttgggttcaggttctgtcgg

SEQ ID NO: 11654 - DNA, 20 bp, Artificial Sequence
  Synthetic: descartes_7567_NTC
gggctagggaatatgacccg

SEQ ID NO: 11655 - DNA, 20 bp, Artificial Sequence
  Synthetic: descartes_7568_NTC
cgtggtagaggtcacaacct

SEQ ID NO: 11656 - DNA, 20 bp, Artificial Sequence
  Synthetic: descartes_7569_NTC
gagtcatgattagtgcgggc

SEQ ID NO: 11657 - DNA, 20 bp, Artificial Sequence
  Synthetic: descartes_7570_NTC
tagtgttctgacatactaac

SEQ ID NO: 11658 - DNA, 20 bp, Artificial Sequence
  Synthetic: descartes_7571_NTC
aaaaaccgcgctgtccagac

SEQ ID NO: 11659 - DNA, 20 bp, Artificial Sequence
  Synthetic: descartes_7572_NTC
gaatctaagtctaatgatgc

SEQ ID NO: 11660 - DNA, 20 bp, Artificial Sequence
  Synthetic: descartes_7573_NTC
gctggtactgcgtacaactt

SEQ ID NO: 11661 - DNA, 20 bp, Artificial Sequence
  Synthetic: descartes_7574_NTC
cgaaattggtgttggtccgg

SEQ ID NO: 11662 - DNA, 20 bp, Artificial Sequence
  Synthetic: descartes_7575_NTC
gacctgtagaactcttcgcg

SEQ ID NO: 11663 - DNA, 20 bp, Artificial Sequence
  Synthetic: descartes_7576_NTC
gttggtaggctaggaacgcg

SEQ ID NO: 11664 - DNA, 20 bp, Artificial Sequence
  Synthetic: descartes_7577_NTC
gctagaatacatgcgattta

SEQ ID NO: 11665 - DNA, 20 bp, Artificial Sequence
  Synthetic: descartes_7578_NTC
aacatataattctcgagcga

SEQ ID NO: 11666 - DNA, 20 bp, Artificial Sequence
  Synthetic: descartes_7579_NTC
ggatagaggcacggataccg

SEQ ID NO: 11667 - DNA, 20 bp, Artificial Sequence
  Synthetic: descartes_7580_NTC
tccattgcattttgcttaaa

SEQ ID NO: 11668 - DNA, 20 bp, Artificial Sequence
  Synthetic: descartes_7581_NTC
gacgcgcgcaactgcgatta

SEQ ID NO: 11669 - DNA, 20 bp, Artificial Sequence
  Synthetic: descartes_7582_NTC
caagcggtattattattacc

SEQ ID NO: 11670 - DNA, 20 bp, Artificial Sequence
  Synthetic: descartes_7583_NTC
tcgctcgctccatcgccagc

SEQ ID NO: 11671 - DNA, 20 bp, Artificial Sequence
  Synthetic: descartes_7584_NTC
gctatgcagtgccagccttg

SEQ ID NO: 11672 - DNA, 20 bp, Artificial Sequence
  Synthetic: descartes_7585_NTC
acttgatgtcccgcataatc

SEQ ID NO: 11673 - DNA, 20 bp, Artificial Sequence
  Synthetic: descartes_7586_NTC
agtttacaagttacactggc

SEQ ID NO: 11674 - DNA, 20 bp, Artificial Sequence
  Synthetic: descartes_7587_NTC
tgaaatcccctagtacttag

SEQ ID NO: 11675 - DNA, 20 bp, Artificial Sequence
  Synthetic: descartes_7588_NTC
gatcaccacaattcaactag

SEQ ID NO: 11676 - DNA, 20 bp, Artificial Sequence
  Synthetic: descartes_7589_NTC
cattgcgcgtaactgaggtc

SEQ ID NO: 11677 - DNA, 20 bp, Artificial Sequence
  Synthetic: descartes_7590_NTC
ttcaaaggttctatacagct

SEQ ID NO: 11678 - DNA, 20 bp, Artificial Sequence
  Synthetic: descartes_7591_NTC
catcactattaactgtgaac

SEQ ID NO: 11679 - DNA, 20 bp, Artificial Sequence
  Synthetic: descartes_7592_NTC
ggtctaaatcccacgctcaa

SEQ ID NO: 11680 - DNA, 20 bp, Artificial Sequence
  Synthetic: descartes_7593_NTC
tagcccgacgcgcgcgacgc

SEQ ID NO: 11681 - DNA, 20 bp, Artificial Sequence
  Synthetic: descartes_7594_NTC
ggagccttcgcgagggacga

SEQ ID NO: 11682 - DNA, 20 bp, Artificial Sequence
  Synthetic: descartes_7595_NTC
acaaccggcaaattccgcat

SEQ ID NO: 11683 - DNA, 20 bp, Artificial Sequence
  Synthetic: descartes_7596_NTC
gcgaacgctggtatgtgggt

SEQ ID NO: 11684 - DNA, 20 bp, Artificial Sequence
  Synthetic: descartes_7597_NTC
caagatgccatctctactgg

SEQ ID NO: 11685 - DNA, 20 bp, Artificial Sequence
  Synthetic: descartes_7598_NTC
gaaagccaactctggtgata

SEQ ID NO: 11686 - DNA, 20 bp, Artificial Sequence
  Synthetic: descartes_7599_NTC
gatgttaaactacgcacgta

SEQ ID NO: 11687 - DNA, 20 bp, Artificial Sequence
  Synthetic: descartes_7600_NTC
agcttttcacaccgttggtg

SEQ ID NO: 11688 - DNA, 20 bp, Artificial Sequence
  Synthetic: descartes_7601_NTC
agcattggagacgcgttaac

SEQ ID NO: 11689 - DNA, 20 bp, Artificial Sequence
  Synthetic: descartes_7602_NTC
ctaccctgtgccgtctttga

SEQ ID NO: 11690 - DNA, 20 bp, Artificial Sequence
  Synthetic: descartes_7603_NTC
gtggacccctcgccaagcaa

SEQ ID NO: 11691 - DNA, 20 bp, Artificial Sequence
  Synthetic: descartes_7604_NTC
tcccctgtgtaaccggaatc

SEQ ID NO: 11692 - DNA, 20 bp, Artificial Sequence
  Synthetic: descartes_7605_NTC
tcattcataacatggatccc

SEQ ID NO: 11693 - DNA, 20 bp, Artificial Sequence
  Synthetic: descartes_7606_NTC
ttcataaagtgtagcaggag

SEQ ID NO: 11694 - DNA, 20 bp, Artificial Sequence
  Synthetic: descartes_7607_NTC
gtatgaagttgttcagttga

SEQ ID NO: 11695 - DNA, 20 bp, Artificial Sequence
  Synthetic: descartes_7608_NTC
cttcgcataacacgacacgg

SEQ ID NO: 11696 - DNA, 20 bp, Artificial Sequence
  Synthetic: descartes_7609_NTC
tagtcagcccggctgtgctg

SEQ ID NO: 11697 - DNA, 20 bp, Artificial Sequence
  Synthetic: descartes_7610_NTC
ggatcaatatctaactgtcc

SEQ ID NO: 11698 - DNA, 20 bp, Artificial Sequence
  Synthetic: descartes_7611_NTC
tacgttcaggtatatgtagt

SEQ ID NO: 11699 - DNA, 20 bp, Artificial Sequence
  Synthetic: descartes_7612_NTC
agtagggactgcttttgttg

SEQ ID NO: 11700 - DNA, 20 bp, Artificial Sequence
  Synthetic: descartes_7613_NTC
atgacgcgcagcattctgga

SEQ ID NO: 11701 - DNA, 20 bp, Artificial Sequence
  Synthetic: descartes_7614_NTC
tattgacaagtcatctctca

SEQ ID NO: 11702 - DNA, 20 bp, Artificial Sequence
  Synthetic: descartes_7615_NTC
accatggctaaccccgtctg

SEQ ID NO: 11703 - DNA, 20 bp, Artificial Sequence
  Synthetic: descartes_7616_NTC
taccagggcgctcaatatag

SEQ ID NO: 11704 - DNA, 20 bp, Artificial Sequence
  Synthetic: descartes_7617_NTC
attgagtatggattgtcgta

SEQ ID NO: 11705 - DNA, 20 bp, Artificial Sequence
  Synthetic: descartes_7618_NTC
aaacgaaatacaaattagaa

SEQ ID NO: 11706 - DNA, 20 bp, Artificial Sequence
  Synthetic: descartes_7619_NTC
atcgttgccgctacggtcgg

SEQ ID NO: 11707 - DNA, 20 bp, Artificial Sequence
  Synthetic: descartes_7620_NTC
cgtcctaaagcatacgccgg

SEQ ID NO: 11708 - DNA, 20 bp, Artificial Sequence
  Synthetic: descartes_7621_NTC
gagtacatatgaaactcgaa

SEQ ID NO: 11709 - DNA, 20 bp, Artificial Sequence
  Synthetic: descartes_7622_NTC
aagttgttgactcatttgcc

SEQ ID NO: 11710 - DNA, 20 bp, Artificial Sequence
  Synthetic: descartes_7623_NTC
gccgccggtaattaagactg

SEQ ID NO: 11711 - DNA, 20 bp, Artificial Sequence
  Synthetic: descartes_7624_NTC
cgcgccccggctttgattca

SEQ ID NO: 11712 - DNA, 20 bp, Artificial Sequence
  Synthetic: descartes_7625_NTC
tctggggaagattactatca

SEQ ID NO: 11713 - DNA, 20 bp, Artificial Sequence
  Synthetic: descartes_7626_NTC
tcgactcatagcgtggagac

SEQ ID NO: 11714 - DNA, 20 bp, Artificial Sequence
  Synthetic: descartes_7627_NTC
tggcgtagacgcgggtcctg

SEQ ID NO: 11715 - DNA, 20 bp, Artificial Sequence
  Synthetic: descartes_7628_NTC
ccgagtactgcgcgtgcgtt

SEQ ID NO: 11716 - DNA, 20 bp, Artificial Sequence
  Synthetic: descartes_7629_NTC
gccgtgagcggcttcaagcc

SEQ ID NO: 11717 - DNA, 20 bp, Artificial Sequence
  Synthetic: descartes_7630_NTC
tcgattataagagctactca

SEQ ID NO: 11718 - DNA, 20 bp, Artificial Sequence
  Synthetic: descartes_7631_NTC
ttaatcatgcaaatagctgt

SEQ ID NO: 11719 - DNA, 20 bp, Artificial Sequence
  Synthetic: descartes_7632_NTC
catgaaacatgtgcaattct

SEQ ID NO: 11720 - DNA, 20 bp, Artificial Sequence
  Synthetic: descartes_7633_NTC
gggtcctctgggcgcccagc

SEQ ID NO: 11721 - DNA, 20 bp, Artificial Sequence
  Synthetic: descartes_7634_NTC
cactttgctataggcgagac

SEQ ID NO: 11722 - DNA, 20 bp, Artificial Sequence
  Synthetic: descartes_7635_NTC
tcgaatgaggatgatgtgtc

SEQ ID NO: 11723 - DNA, 20 bp, Artificial Sequence
  Synthetic: descartes_7636_NTC
tgaaatcgtagtagatacgg

SEQ ID NO: 11724 - DNA, 20 bp, Artificial Sequence
  Synthetic: descartes_7637_NTC
cgcctacacgtcgagatttg

SEQ ID NO: 11725 - DNA, 20 bp, Artificial Sequence
  Synthetic: descartes_7638_NTC
gtacacgtgcttttgggccc

SEQ ID NO: 11726 - DNA, 20 bp, Artificial Sequence
  Synthetic: descartes_7639_NTC
tatggttcgaacccccttat

SEQ ID NO: 11727 - DNA, 20 bp, Artificial Sequence
  Synthetic: descartes_7640_NTC
gaatcgtttgtatggggtat

SEQ ID NO: 11728 - DNA, 20 bp, Artificial Sequence
  Synthetic: descartes_7641_NTC
aggaaaggtttggtttaaac

SEQ ID NO: 11729 - DNA, 20 bp, Artificial Sequence
  Synthetic: descartes_7642_NTC
tcatggggtagaccccaacg

SEQ ID NO: 11730 - DNA, 20 bp, Artificial Sequence
  Synthetic: descartes_7643_NTC
atccactagtcgtatctttc

SEQ ID NO: 11731 - DNA, 20 bp, Artificial Sequence
  Synthetic: descartes_7644_NTC
cctattgtaaggagttcaat

SEQ ID NO: 11732 - DNA, 20 bp, Artificial Sequence
  Synthetic: descartes_7645_NTC
gtgcaactcccagtggacgg

SEQ ID NO: 11733 - DNA, 20 bp, Artificial Sequence
  Synthetic: descartes_7646_NTC
gaagcgtctgtcgaaacggg

SEQ ID NO: 11734 - DNA, 20 bp, Artificial Sequence
  Synthetic: descartes_7647_NTC
acccgattgtcataagcagt

SEQ ID NO: 11735 - DNA, 20 bp, Artificial Sequence
  Synthetic: descartes_7648_NTC
tatctgaccgcgaggaccag

SEQ ID NO: 11736 - DNA, 20 bp, Artificial Sequence
  Synthetic: descartes_7649_NTC
cagttatggtgttaaatact

SEQ ID NO: 11737 - DNA, 20 bp, Artificial Sequence
  Synthetic: descartes_7650_NTC
ttgtgaacaggatgtttgca

SEQ ID NO: 11738 - DNA, 20 bp, Artificial Sequence
  Synthetic: descartes_7651_NTC
gcggtgacaagttcggtagc

SEQ ID NO: 11739 - DNA, 20 bp, Artificial Sequence
  Synthetic: descartes_7652_NTC
ttagaatgacgccgcgcaca

SEQ ID NO: 11740 - DNA, 20 bp, Artificial Sequence
  Synthetic: descartes_7653_NTC
tgtcgatccgactatatcga

SEQ ID NO: 11741 - DNA, 20 bp, Artificial Sequence
  Synthetic: descartes_7654_NTC
agacaccagttcgtatgaaa

SEQ ID NO: 11742 - DNA, 20 bp, Artificial Sequence
  Synthetic: descartes_7655_NTC
acccccaggcccaacacaaa

SEQ ID NO: 11743 - DNA, 20 bp, Artificial Sequence
  Synthetic: descartes_7656_NTC
ccaacgccgcatacctctcg

SEQ ID NO: 11744 - DNA, 20 bp, Artificial Sequence
  Synthetic: descartes_7657_NTC
caccttggcgcgccgaatag

SEQ ID NO: 11745 - DNA, 20 bp, Artificial Sequence
  Synthetic: descartes_7658_NTC
agcgagaattcaccatccat

SEQ ID NO: 11746 - DNA, 20 bp, Artificial Sequence
  Synthetic: descartes_7659_NTC
accttcttcaagcgttaaag

SEQ ID NO: 11747 - DNA, 20 bp, Artificial Sequence
  Synthetic: descartes_7660_NTC
actagcacgcccccgaaggc

SEQ ID NO: 11748 - DNA, 20 bp, Artificial Sequence
  Synthetic: descartes_7661_NTC
cgtacagggttgcgtggatt

SEQ ID NO: 11749 - DNA, 20 bp, Artificial Sequence
  Synthetic: descartes_7662_NTC
ggtaaaatacacgatccaca

SEQ ID NO: 11750 - DNA, 20 bp, Artificial Sequence
  Synthetic: descartes_7663_NTC
agccgtgaacctacaacata

SEQ ID NO: 11751 - DNA, 20 bp, Artificial Sequence
  Synthetic: descartes_7664_NTC
gtcctctccttaatgcctgc

SEQ ID NO: 11752 - DNA, 20 bp, Artificial Sequence
  Synthetic: descartes_7665_NTC
tcgagtcggaggaatatata

SEQ ID NO: 11753 - DNA, 20 bp, Artificial Sequence
  Synthetic: descartes_7666_NTC
ctcatctgttggtcgagccc

SEQ ID NO: 11754 - DNA, 20 bp, Artificial Sequence
  Synthetic: descartes_7667_NTC
ttatcacgacgcgaccagaa

SEQ ID NO: 11755 - DNA, 20 bp, Artificial Sequence
  Synthetic: descartes_7668_NTC
acagtggagactcagcgata

SEQ ID NO: 11756 - DNA, 20 bp, Artificial Sequence
  Synthetic: descartes_7669_NTC
ggaagcgcagtataatcgtg

SEQ ID NO: 11757 - DNA, 20 bp, Artificial Sequence
  Synthetic: descartes_7670_NTC
atttgaatgcggctctcaag

SEQ ID NO: 11758 - DNA, 20 bp, Artificial Sequence
  Synthetic: descartes_7671_NTC
aactatggtagtaggcgtac

SEQ ID NO: 11759 - DNA, 20 bp, Artificial Sequence
  Synthetic: descartes_7672_NTC
ataccccaccagccgtccac

SEQ ID NO: 11760 - DNA, 20 bp, Artificial Sequence
  Synthetic: descartes_7673_NTC
gactcgtaataaatgattca

SEQ ID NO: 11761 - DNA, 20 bp, Artificial Sequence
  Synthetic: descartes_7674_NTC
gcaaagtatcgaccccaagc

SEQ ID NO: 11762 - DNA, 20 bp, Artificial Sequence
  Synthetic: descartes_7675_NTC
acgtacaccctcgtgacagc

SEQ ID NO: 11763 - DNA, 20 bp, Artificial Sequence
  Synthetic: descartes_7676_NTC
gtacgggatagatgtgaccg

SEQ ID NO: 11764 - DNA, 20 bp, Artificial Sequence
  Synthetic: descartes_7677_NTC
cgaatgacatctcaggctca

SEQ ID NO: 11765 - DNA, 20 bp, Artificial Sequence
  Synthetic: descartes_7678_NTC
tacgtggcttgcttcgtttc

SEQ ID NO: 11766 - DNA, 20 bp, Artificial Sequence
  Synthetic: descartes_7679_NTC
ttagctcatggccagaccaa

SEQ ID NO: 11767 - DNA, 20 bp, Artificial Sequence
  Synthetic: descartes_7680_NTC
agctgaatcctcgacggaga

SEQ ID NO: 11768 - DNA, 20 bp, Artificial Sequence
  Synthetic: descartes_7681_NTC
tattggaagcatcatggaaa

SEQ ID NO: 11769 - DNA, 20 bp, Artificial Sequence
  Synthetic: descartes_7682_NTC
gatctagcgccaataagctt

SEQ ID NO: 11770 - DNA, 20 bp, Artificial Sequence
  Synthetic: descartes_7683_NTC
gtgccactgctgggggcgca

SEQ ID NO: 11771 - DNA, 20 bp, Artificial Sequence
  Synthetic: descartes_7684_NTC
ggcccccactgacggcaaca

SEQ ID NO: 11772 - DNA, 20 bp, Artificial Sequence
  Synthetic: descartes_7685_NTC
atgcccggactcccaccgtc

SEQ ID NO: 11773 - DNA, 20 bp, Artificial Sequence
  Synthetic: descartes_7686_NTC
cgtggtctactctctacttg

SEQ ID NO: 11774 - DNA, 20 bp, Artificial Sequence
  Synthetic: descartes_7687_NTC
ttgtttatcaaagaggagct

SEQ ID NO: 11775 - DNA, 20 bp, Artificial Sequence
  Synthetic: descartes_7688_NTC
ggtagggaggtccagattcg

SEQ ID NO: 11776 - DNA, 20 bp, Artificial Sequence
  Synthetic: descartes_7689_NTC
aactggagacagaggtataa

SEQ ID NO: 11777 - DNA, 20 bp, Artificial Sequence
  Synthetic: descartes_7690_NTC
cagtgctacccagtgattta

SEQ ID NO: 11778 - DNA, 20 bp, Artificial Sequence
  Synthetic: descartes_7691_NTC
gttacgcgctcttcccagat

SEQ ID NO: 11779 - DNA, 20 bp, Artificial Sequence
  Synthetic: descartes_7692_NTC
aaggtaagttcgggtgctcg

SEQ ID NO: 11780 - DNA, 20 bp, Artificial Sequence
  Synthetic: descartes_7693_NTC
tttaccgtgatctagtttgt

SEQ ID NO: 11781 - DNA, 20 bp, Artificial Sequence
  Synthetic: descartes_7694_NTC
aaattactaccatgattgcc

SEQ ID NO: 11782 - DNA, 20 bp, Artificial Sequence
  Synthetic: descartes_7695_NTC
ttggaaggcaagtatagtat

SEQ ID NO: 11783 - DNA, 20 bp, Artificial Sequence
  Synthetic: descartes_7696_NTC
tgagaaacgcgatacagaaa

SEQ ID NO: 11784 - DNA, 20 bp, Artificial Sequence
  Synthetic: descartes_7697_NTC
gcgacggagggactgatcaa

SEQ ID NO: 11785 - DNA, 20 bp, Artificial Sequence
  Synthetic: descartes_7698_NTC
gtcacctcctccagagctcc

SEQ ID NO: 11786 - DNA, 20 bp, Artificial Sequence
  Synthetic: descartes_7699_NTC
gcggtaagcccgtgcgaccg

SEQ ID NO: 11787 - DNA, 20 bp, Artificial Sequence
  Synthetic: descartes_7700_NTC
gcgctgagatgggcacaatc

SEQ ID NO: 11788 - DNA, 20 bp, Artificial Sequence
  Synthetic: descartes_7701_NTC
tagacccaagcaggtacgta

SEQ ID NO: 11789 - DNA, 20 bp, Artificial Sequence
  Synthetic: descartes_7702_NTC
ctggcgatcggctgcctcca

SEQ ID NO: 11790 - DNA, 20 bp, Artificial Sequence
  Synthetic: descartes_7703_NTC
acatatcgttcgctatttaa

SEQ ID NO: 11791 - DNA, 20 bp, Artificial Sequence
  Synthetic: descartes_7704_NTC
tcccgataacctacagccca

SEQ ID NO: 11792 - DNA, 20 bp, Artificial Sequence
  Synthetic: descartes_7705_NTC
attacctctgtccgggggca

SEQ ID NO: 11793 - DNA, 20 bp, Artificial Sequence
  Synthetic: descartes_7706_NTC
agaattagaggataaatacc

SEQ ID NO: 11794 - DNA, 20 bp, Artificial Sequence
  Synthetic: descartes_7707_NTC
gactttgaggacgccatctg

SEQ ID NO: 11795 - DNA, 20 bp, Artificial Sequence
  Synthetic: descartes_7708_NTC
cgcgtgcggatgatgccgcc

SEQ ID NO: 11796 - DNA, 20 bp, Artificial Sequence
  Synthetic: descartes_7709_NTC
actctgcggcgctttccttg

SEQ ID NO: 11797 - DNA, 20 bp, Artificial Sequence
  Synthetic: descartes_7710_NTC
ttgggtacattattgaccca

SEQ ID NO: 11798 - DNA, 20 bp, Artificial Sequence
  Synthetic: descartes_7711_NTC
cggaagagtgcaatgacacg

SEQ ID NO: 11799 - DNA, 20 bp, Artificial Sequence
  Synthetic: descartes_7712_NTC
aggtaagaaacttaggttag

SEQ ID NO: 11800 - DNA, 20 bp, Artificial Sequence
  Synthetic: descartes_7713_NTC
cagcggctgggcctcacgaa

SEQ ID NO: 11801 - DNA, 20 bp, Artificial Sequence
  Synthetic: descartes_7714_NTC
agtctatgtagcgcacggca

SEQ ID NO: 11802 - DNA, 20 bp, Artificial Sequence
  Synthetic: descartes_7715_NTC
ctgcgctgtacataagtgcg

SEQ ID NO: 11803 - DNA, 20 bp, Artificial Sequence
  Synthetic: descartes_7716_NTC
tcatcattgaagccgacagt

SEQ ID NO: 11804 - DNA, 20 bp, Artificial Sequence
  Synthetic: descartes_7717_NTC
ttgacaggcgtccagagcaa

SEQ ID NO: 11805 - DNA, 20 bp, Artificial Sequence
  Synthetic: descartes_7718_NTC
tcggtaggccagccctttct

SEQ ID NO: 11806 - DNA, 20 bp, Artificial Sequence
  Synthetic: descartes_7719_NTC
acctctctattgtgaaaccg

SEQ ID NO: 11807 - DNA, 20 bp, Artificial Sequence
  Synthetic: descartes_7720_NTC
tcaaagacatatttcttgag

SEQ ID NO: 11808 - DNA, 20 bp, Artificial Sequence
  Synthetic: descartes_7721_NTC
aatagaggtacttcgcctcg

SEQ ID NO: 11809 - DNA, 20 bp, Artificial Sequence
  Synthetic: descartes_7722_NTC
agtgattgcgtcacaaagtg

SEQ ID NO: 11810 - DNA, 20 bp, Artificial Sequence
  Synthetic: descartes_7723_NTC
ctacttattctgcctaacta

SEQ ID NO: 11811 - DNA, 20 bp, Artificial Sequence
  Synthetic: descartes_7724_NTC
gcgtgccgagttacacagac

SEQ ID NO: 11812 - DNA, 20 bp, Artificial Sequence
  Synthetic: descartes_7725_NTC
gactctgcaattcgccctcc

SEQ ID NO: 11813 - DNA, 20 bp, Artificial Sequence
  Synthetic: descartes_7726_NTC
cgtaagacccatacagaccc

SEQ ID NO: 11814 - DNA, 20 bp, Artificial Sequence
  Synthetic: descartes_7727_NTC
tcgcacgccataatccgacg

SEQ ID NO: 11815 - DNA, 20 bp, Artificial Sequence
  Synthetic: descartes_7728_NTC
tctatagactatgatcagat

SEQ ID NO: 11816 - DNA, 20 bp, Artificial Sequence
  Synthetic: descartes_7729_NTC
ttcagataatgttcatgtcg

SEQ ID NO: 11817 - DNA, 20 bp, Artificial Sequence
  Synthetic: descartes_7730_NTC
gctgccgttccagctgcact

SEQ ID NO: 11818 - DNA, 20 bp, Artificial Sequence
  Synthetic: descartes_7731_NTC
aactccagacgccgttgtgc

SEQ ID NO: 11819 - DNA, 20 bp, Artificial Sequence
  Synthetic: descartes_7732_NTC
gcatcctttaataaccgaac

SEQ ID NO: 11820 - DNA, 20 bp, Artificial Sequence
  Synthetic: descartes_7733_NTC
gaacagatgggcggcaaacc

SEQ ID NO: 11821 - DNA, 20 bp, Artificial Sequence
  Synthetic: descartes_7734_NTC
ccatctctgataccgtatac

SEQ ID NO: 11822 - DNA, 20 bp, Artificial Sequence
  Synthetic: descartes_7735_NTC
tcccgccgggaggtgagtta

SEQ ID NO: 11823 - DNA, 20 bp, Artificial Sequence
  Synthetic: descartes_7736_NTC
tacgcgggtagtagcccatc

SEQ ID NO: 11824 - DNA, 20 bp, Artificial Sequence
  Synthetic: descartes_7737_NTC
gcattttattcgacccccta

SEQ ID NO: 11825 - DNA, 20 bp, Artificial Sequence
  Synthetic: descartes_7738_NTC
gtcatggccccgcaacatac

SEQ ID NO: 11826 - DNA, 20 bp, Artificial Sequence
  Synthetic: descartes_7739_NTC
actgtcttctccgaagtccg

SEQ ID NO: 11827 - DNA, 20 bp, Artificial Sequence
  Synthetic: descartes_7740_NTC
ggcacggtgtaagtaggaat

SEQ ID NO: 11828 - DNA, 20 bp, Artificial Sequence
  Synthetic: descartes_7741_NTC
tatgtgcgtttgcgtcatac

SEQ ID NO: 11829 - DNA, 20 bp, Artificial Sequence
  Synthetic: descartes_7742_NTC
acagtaaagcagctcgccgt

SEQ ID NO: 11830 - DNA, 20 bp, Artificial Sequence
  Synthetic: descartes_7743_NTC
ttgtattttcattcgactca

SEQ ID NO: 11831 - DNA, 20 bp, Artificial Sequence
  Synthetic: descartes_7744_NTC
cagttcacgtcaccccgcgc

SEQ ID NO: 11832 - DNA, 20 bp, Artificial Sequence
  Synthetic: descartes_7745_NTC
gctctagaaaactacaaatg

SEQ ID NO: 11833 - DNA, 20 bp, Artificial Sequence
  Synthetic: descartes_7746_NTC
tgatggccagtaatgagtac

SEQ ID NO: 11834 - DNA, 20 bp, Artificial Sequence
  Synthetic: descartes_7747_NTC
ctatcggatgcaaaattagt

SEQ ID NO: 11835 - DNA, 20 bp, Artificial Sequence
  Synthetic: descartes_7748_NTC
attgctcaatagattgcatg

SEQ ID NO: 11836 - DNA, 20 bp, Artificial Sequence
  Synthetic: descartes_7749_NTC
cttgcggcaccgcctgcgtc

SEQ ID NO: 11837 - DNA, 20 bp, Artificial Sequence
  Synthetic: descartes_7750_NTC
cgatacaatgtcaaccacga

SEQ ID NO: 11838 - DNA, 20 bp, Artificial Sequence
  Synthetic: descartes_7751_NTC
cctcaagcatagttgagaga

SEQ ID NO: 11839 - DNA, 20 bp, Artificial Sequence
  Synthetic: descartes_7752_NTC
atagccctaaagatggtggg

SEQ ID NO: 11840 - DNA, 20 bp, Artificial Sequence
  Synthetic: descartes_7753_NTC
cacccggtaattctgtgaaa

SEQ ID NO: 11841 - DNA, 20 bp, Artificial Sequence
  Synthetic: descartes_7754_NTC
ttagatgtccatatgcgtag

SEQ ID NO: 11842 - DNA, 20 bp, Artificial Sequence
  Synthetic: descartes_7755_NTC
tgtgcccatcctctctgcac

SEQ ID NO: 11843 - DNA, 20 bp, Artificial Sequence
  Synthetic: descartes_7756_NTC
attacattaccactacgcgt

SEQ ID NO: 11844 - DNA, 20 bp, Artificial Sequence
  Synthetic: descartes_7757_NTC
cagtccgttcgtggatacgg

SEQ ID NO: 11845 - DNA, 20 bp, Artificial Sequence
  Synthetic: descartes_7758_NTC
cctacggaccaacaagaact

SEQ ID NO: 11846 - DNA, 20 bp, Artificial Sequence
  Synthetic: descartes_7759_NTC
ccgtctcgtcagaattcgcc

SEQ ID NO: 11847 - DNA, 20 bp, Artificial Sequence
  Synthetic: descartes_7760_NTC
acccaagaaccgaaaagtag

SEQ ID NO: 11848 - DNA, 20 bp, Artificial Sequence
  Synthetic: descartes_7761_NTC
ggtccttacatctaatattc

SEQ ID NO: 11849 - DNA, 20 bp, Artificial Sequence
  Synthetic: descartes_7762_NTC
atcaagccgattatgtacat

SEQ ID NO: 11850 - DNA, 20 bp, Artificial Sequence
  Synthetic: descartes_7763_NTC
tcgcgcagttcttgagccgt

SEQ ID NO: 11851 - DNA, 20 bp, Artificial Sequence
  Synthetic: descartes_7764_NTC
gccctctaaaaagccaccat

SEQ ID NO: 11852 - DNA, 20 bp, Artificial Sequence
  Synthetic: descartes_7765_NTC
ttgggagtggacccgtaacc

SEQ ID NO: 11853 - DNA, 20 bp, Artificial Sequence
  Synthetic: descartes_7766_NTC
acgtttgtaaggttgccacg

SEQ ID NO: 11854 - DNA, 20 bp, Artificial Sequence
  Synthetic: descartes_7767_NTC
agaaagtcttaatggtgcct

SEQ ID NO: 11855 - DNA, 20 bp, Artificial Sequence
  Synthetic: descartes_7768_NTC
caagtatagagcatttcagg

SEQ ID NO: 11856 - DNA, 20 bp, Artificial Sequence
  Synthetic: descartes_7769_NTC
tgtattgatactcagtgata

SEQ ID NO: 11857 - DNA, 20 bp, Artificial Sequence
  Synthetic: descartes_7770_NTC
ttcgaaggttctaagctacc

SEQ ID NO: 11858 - DNA, 20 bp, Artificial Sequence
  Synthetic: descartes_7771_NTC
gctatgaactcagaaatacc

SEQ ID NO: 11859 - DNA, 20 bp, Artificial Sequence
  Synthetic: descartes_7772_NTC
aggtccttcatttgccggaa

SEQ ID NO: 11860 - DNA, 20 bp, Artificial Sequence
  Synthetic: descartes_7773_NTC
gcagacgctcattgctgagg

SEQ ID NO: 11861 - DNA, 20 bp, Artificial Sequence
  Synthetic: descartes_7774_NTC
ctacctgaccccaccgctaa

SEQ ID NO: 11862 - DNA, 20 bp, Artificial Sequence
  Synthetic: descartes_7775_NTC
ctcctttcgcccgtgaacac

SEQ ID NO: 11863 - DNA, 20 bp, Artificial Sequence
  Synthetic: descartes_7776_NTC
gcgtcagggggtgattgtgt

SEQ ID NO: 11864 - DNA, 20 bp, Artificial Sequence
  Synthetic: descartes_7777_NTC
aaagtcgttcgtattttatc

SEQ ID NO: 11865 - DNA, 20 bp, Artificial Sequence
  Synthetic: descartes_7778_NTC
ttcctatagtgccatagcgt

SEQ ID NO: 11866 - DNA, 20 bp, Artificial Sequence
  Synthetic: descartes_7779_NTC
tctcgagacgatttgagctc

SEQ ID NO: 11867 - DNA, 20 bp, Artificial Sequence
  Synthetic: descartes_7780_NTC
gactacgttaagtgattggc

SEQ ID NO: 11868 - DNA, 20 bp, Artificial Sequence
  Synthetic: descartes_7781_NTC
gggagccaccgtcagctaaa

SEQ ID NO: 11869 - DNA, 20 bp, Artificial Sequence
  Synthetic: descartes_7782_NTC
acttgggcaacggccttcgc

SEQ ID NO: 11870 - DNA, 20 bp, Artificial Sequence
  Synthetic: descartes_7783_NTC
tggacgcagagagaatgagt

SEQ ID NO: 11871 - DNA, 20 bp, Artificial Sequence
  Synthetic: descartes_7784_NTC
acgacatcggtcaattgaag

SEQ ID NO: 11872 - DNA, 20 bp, Artificial Sequence
  Synthetic: descartes_7785_NTC
agctttgtcgaaactggcgt

SEQ ID NO: 11873 - DNA, 20 bp, Artificial Sequence
  Synthetic: descartes_7786_NTC
cgctagacgagaatgcggtg

SEQ ID NO: 11874 - DNA, 20 bp, Artificial Sequence
  Synthetic: descartes_7787_NTC
agccagggtccttaaaatag

SEQ ID NO: 11875 - DNA, 20 bp, Artificial Sequence
  Synthetic: descartes_7788_NTC
gcagggcaacggctcttcag

SEQ ID NO: 11876 - DNA, 20 bp, Artificial Sequence
  Synthetic: descartes_7789_NTC
cacagtgatcgagggtggtt

SEQ ID NO: 11877 - DNA, 20 bp, Artificial Sequence
  Synthetic: descartes_7790_NTC
tcctttgtgtttggacctta

SEQ ID NO: 11878 - DNA, 20 bp, Artificial Sequence
  Synthetic: descartes_7791_NTC
gttaagtgtcaggcgcgcac

SEQ ID NO: 11879 - DNA, 20 bp, Artificial Sequence
  Synthetic: descartes_7792_NTC
caccggcctccatgccccgt

SEQ ID NO: 11880 - DNA, 20 bp, Artificial Sequence
  Synthetic: descartes_7793_NTC
gctcgagctaccccgggaca

SEQ ID NO: 11881 - DNA, 20 bp, Artificial Sequence
  Synthetic: descartes_7794_NTC
cactttagatcgtcactaag

SEQ ID NO: 11882 - DNA, 20 bp, Artificial Sequence
  Synthetic: descartes_7795_NTC
aaggatgaactgcggtgttc

SEQ ID NO: 11883 - DNA, 20 bp, Artificial Sequence
  Synthetic: descartes_7796_NTC
tgactccacactaggattct

SEQ ID NO: 11884 - DNA, 20 bp, Artificial Sequence
  Synthetic: descartes_7797_NTC
tgtttagacatgatctacgg

SEQ ID NO: 11885 - DNA, 20 bp, Artificial Sequence
  Synthetic: descartes_7798_NTC
agcttatcacccttacactg

SEQ ID NO: 11886 - DNA, 20 bp, Artificial Sequence
  Synthetic: descartes_7799_NTC
gacaagctagctgtgtttgt

SEQ ID NO: 11887 - DNA, 20 bp, Artificial Sequence
  Synthetic: descartes_7800_NTC
ttccgttcctggacgagcgc

SEQ ID NO: 11888 - DNA, 20 bp, Artificial Sequence
  Synthetic: descartes_7801_NTC
tcagttaaccgtaaccagat

SEQ ID NO: 11889 - DNA, 20 bp, Artificial Sequence
  Synthetic: descartes_7802_NTC
cgggaaagcgacttcttggt

SEQ ID NO: 11890 - DNA, 20 bp, Artificial Sequence
  Synthetic: descartes_7803_NTC
aagtggttgaaggtgcatct

SEQ ID NO: 11891 - DNA, 20 bp, Artificial Sequence
  Synthetic: descartes_7804_NTC
gcacggagacaggtgtgact

SEQ ID NO: 11892 - DNA, 20 bp, Artificial Sequence
  Synthetic: descartes_7805_NTC
tgtgaactcataaatgccag

SEQ ID NO: 11893 - DNA, 20 bp, Artificial Sequence
  Synthetic: descartes_7806_NTC
tggaggatcaggttcgcaat

SEQ ID NO: 11894 - DNA, 20 bp, Artificial Sequence
  Synthetic: descartes_7807_NTC
ttgcatacaagcagactgtg

SEQ ID NO: 11895 - DNA, 20 bp, Artificial Sequence
  Synthetic: descartes_7808_NTC
cctaagctgtaggtctgcct

SEQ ID NO: 11896 - DNA, 20 bp, Artificial Sequence
  Synthetic: descartes_7809_NTC
ggggatcaggctaaaccccg

SEQ ID NO: 11897 - DNA, 20 bp, Artificial Sequence
  Synthetic: descartes_7810_NTC
atcttcgcacgccctaatag

SEQ ID NO: 11898 - DNA, 20 bp, Artificial Sequence
  Synthetic: descartes_7811_NTC
tacaagcacccgatggtgtt

SEQ ID NO: 11899 - DNA, 20 bp, Artificial Sequence
  Synthetic: descartes_7812_NTC
attgccagatcgacctgtca

SEQ ID NO: 11900 - DNA, 20 bp, Artificial Sequence
  Synthetic: descartes_7813_NTC
aaactccagatcgattgcca

SEQ ID NO: 11901 - DNA, 20 bp, Artificial Sequence
  Synthetic: descartes_7814_NTC
ttgccctcgcctctgctatt

SEQ ID NO: 11902 - DNA, 20 bp, Artificial Sequence
  Synthetic: descartes_7815_NTC
tggtttcctgctagtcacct

SEQ ID NO: 11903 - DNA, 20 bp, Artificial Sequence
  Synthetic: descartes_7816_NTC
gtaatactctcaaaccggac

SEQ ID NO: 11904 - DNA, 20 bp, Artificial Sequence
  Synthetic: descartes_7817_NTC
gattatgtcgtcaagtttca

SEQ ID NO: 11905 - DNA, 20 bp, Artificial Sequence
  Synthetic: descartes_7818_NTC
tttccagcgacccgtcccta

SEQ ID NO: 11906 - DNA, 20 bp, Artificial Sequence
  Synthetic: descartes_7819_NTC
ctgtataccgcggaaccatc

SEQ ID NO: 11907 - DNA, 20 bp, Artificial Sequence
  Synthetic: descartes_7820_NTC
ctttgcgagacagttccccc

SEQ ID NO: 11908 - DNA, 20 bp, Artificial Sequence
  Synthetic: descartes_7821_NTC
gttatagcccttgtctacga

SEQ ID NO: 11909 - DNA, 20 bp, Artificial Sequence
  Synthetic: descartes_7822_NTC
ggcgtctgccctgattcacc

SEQ ID NO: 11910 - DNA, 20 bp, Artificial Sequence
  Synthetic: descartes_7823_NTC
atttattcgctctttgatac

SEQ ID NO: 11911 - DNA, 20 bp, Artificial Sequence
  Synthetic: descartes_7824_NTC
tgcagggaggcaacgcggat

SEQ ID NO: 11912 - DNA, 20 bp, Artificial Sequence
  Synthetic: descartes_7825_NTC
aaggacactgttagtgccgt

SEQ ID NO: 11913 - DNA, 20 bp, Artificial Sequence
  Synthetic: descartes_7826_NTC
tctgtctccgagtgttttat

SEQ ID NO: 11914 - DNA, 20 bp, Artificial Sequence
  Synthetic: descartes_7827_NTC
tcaagagaaacgaccggtac

SEQ ID NO: 11915 - DNA, 20 bp, Artificial Sequence
  Synthetic: descartes_7828_NTC
ccggatctgttaaaaatctg

SEQ ID NO: 11916 - DNA, 20 bp, Artificial Sequence
  Synthetic: descartes_7829_NTC
tagggcacgtacgtatctgg

SEQ ID NO: 11917 - DNA, 20 bp, Artificial Sequence
  Synthetic: descartes_7830_NTC
cgattcatgtagtatacaga

SEQ ID NO: 11918 - DNA, 20 bp, Artificial Sequence
  Synthetic: descartes_7831_NTC
cgaataagacgaccgaattc

SEQ ID NO: 11919 - DNA, 20 bp, Artificial Sequence
  Synthetic: descartes_7832_NTC
aaggtgttgcatataagaaa

SEQ ID NO: 11920 - DNA, 20 bp, Artificial Sequence
  Synthetic: descartes_7833_NTC
agggccaccacataatacgg

SEQ ID NO: 11921 - DNA, 20 bp, Artificial Sequence
  Synthetic: descartes_7834_NTC
ggtctcgggctcacaggatc

SEQ ID NO: 11922 - DNA, 20 bp, Artificial Sequence
  Synthetic: descartes_7835_NTC
gaaatttgaatcaattagtg

SEQ ID NO: 11923 - DNA, 20 bp, Artificial Sequence
  Synthetic: descartes_7836_NTC
gtacaacagatatattgtca

SEQ ID NO: 11924 - DNA, 20 bp, Artificial Sequence
  Synthetic: descartes_7837_NTC
cagactttggctggtaatca

SEQ ID NO: 11925 - DNA, 20 bp, Artificial Sequence
  Synthetic: descartes_7838_NTC
tatggttcaggacgagcgga

SEQ ID NO: 11926 - DNA, 20 bp, Artificial Sequence
  Synthetic: descartes_7839_NTC
ggataatagagtcgacttta

SEQ ID NO: 11927 - DNA, 20 bp, Artificial Sequence
  Synthetic: descartes_7840_NTC
gaagtatgaatgtgcccctt

SEQ ID NO: 11928 - DNA, 20 bp, Artificial Sequence
  Synthetic: descartes_7841_NTC
gtagttgggtccagcttttc

SEQ ID NO: 11929 - DNA, 20 bp, Artificial Sequence
  Synthetic: descartes_7842_NTC
ccctgtatcaccctagaaga

SEQ ID NO: 11930 - DNA, 20 bp, Artificial Sequence
  Synthetic: descartes_7843_NTC
taggcgtaaatcctgaccat

SEQ ID NO: 11931 - DNA, 20 bp, Artificial Sequence
  Synthetic: descartes_7844_NTC
gccatgccggcgccacgctt

SEQ ID NO: 11932 - DNA, 20 bp, Artificial Sequence
  Synthetic: descartes_7845_NTC
gctatagattgcattcgcag

SEQ ID NO: 11933 - DNA, 20 bp, Artificial Sequence
  Synthetic: descartes_7846_NTC
ggctgccatacactaaatca

SEQ ID NO: 11934 - DNA, 20 bp, Artificial Sequence
  Synthetic: descartes_7847_NTC
agctactcaagatcggctag

SEQ ID NO: 11935 - DNA, 20 bp, Artificial Sequence
  Synthetic: descartes_7848_NTC
caggactccgagaaacatcg

SEQ ID NO: 11936 - DNA, 20 bp, Artificial Sequence
  Synthetic: descartes_7849_NTC
agacattaagtcgactcttc

SEQ ID NO: 11937 - DNA, 20 bp, Artificial Sequence
  Synthetic: descartes_7850_NTC
gccggacaggctcgcctgat

SEQ ID NO: 11938 - DNA, 20 bp, Artificial Sequence
  Synthetic: descartes_7851_NTC
tcgtactgggaagtcctgtt

SEQ ID NO: 11939 - DNA, 20 bp, Artificial Sequence
  Synthetic: descartes_7852_NTC
cttcggactgcgcggggatc

SEQ ID NO: 11940 - DNA, 20 bp, Artificial Sequence
  Synthetic: descartes_7853_NTC
gagcatcggtcagggtctct

SEQ ID NO: 11941 - DNA, 20 bp, Artificial Sequence
  Synthetic: descartes_7854_NTC
gttcaatttgtctttgcatg

SEQ ID NO: 11942 - DNA, 20 bp, Artificial Sequence
  Synthetic: descartes_7855_NTC
ttggctctgttgcctcggtt

SEQ ID NO: 11943 - DNA, 20 bp, Artificial Sequence
  Synthetic: descartes_7856_NTC
tcagcattgcggtcccatgc

SEQ ID NO: 11944 - DNA, 20 bp, Artificial Sequence
  Synthetic: descartes_7857_NTC
ctagaaactggctgagaagt

SEQ ID NO: 11945 - DNA, 20 bp, Artificial Sequence
  Synthetic: descartes_7858_NTC
gcccgccatacaccaccgga

SEQ ID NO: 11946 - DNA, 20 bp, Artificial Sequence
  Synthetic: descartes_7859_NTC
ttcggcccgagcgagattag

SEQ ID NO: 11947 - DNA, 20 bp, Artificial Sequence
  Synthetic: descartes_7860_NTC
tgctagccgatagtgatgct

SEQ ID NO: 11948 - DNA, 20 bp, Artificial Sequence
  Synthetic: descartes_7861_NTC
actggagtaacacgctcagc

SEQ ID NO: 11949 - DNA, 20 bp, Artificial Sequence
  Synthetic: descartes_7862_NTC
aagcaagttgcagttggcca

SEQ ID NO: 11950 - DNA, 20 bp, Artificial Sequence
  Synthetic: descartes_7863_NTC
catgctgtgagacgcgtgat

SEQ ID NO: 11951 - DNA, 20 bp, Artificial Sequence
  Synthetic: descartes_7864_NTC
tcccgtagatagtcgcttaa

SEQ ID NO: 11952 - DNA, 20 bp, Artificial Sequence
  Synthetic: descartes_7865_NTC
ttatttgtttatatactttt

SEQ ID NO: 11953 - DNA, 20 bp, Artificial Sequence
  Synthetic: descartes_7866_NTC
tttctcaaccttgctgctct

SEQ ID NO: 11954 - DNA, 20 bp, Artificial Sequence
  Synthetic: descartes_7867_NTC
tagcaaaaatacgaaagctc

SEQ ID NO: 11955 - DNA, 20 bp, Artificial Sequence
  Synthetic: descartes_7868_NTC
gacggacgtcgacgcacctt

SEQ ID NO: 11956 - DNA, 20 bp, Artificial Sequence
  Synthetic: descartes_7869_NTC
aataagcatgagagactgta

SEQ ID NO: 11957 - DNA, 20 bp, Artificial Sequence
  Synthetic: descartes_7870_NTC
actggccaaacagcatatcc

SEQ ID NO: 11958 - DNA, 20 bp, Artificial Sequence
  Synthetic: descartes_7871_NTC
cagcttggaaattctactat

SEQ ID NO: 11959 - DNA, 20 bp, Artificial Sequence
  Synthetic: descartes_7872_NTC
catagacgatccatttttaa

SEQ ID NO: 11960 - DNA, 20 bp, Artificial Sequence
  Synthetic: descartes_7873_NTC
atagcgttggcgaagacgat

SEQ ID NO: 11961 - DNA, 20 bp, Artificial Sequence
  Synthetic: descartes_7874_NTC
ttcgaccctagatcaaggtt

SEQ ID NO: 11962 - DNA, 20 bp, Artificial Sequence
  Synthetic: descartes_7875_NTC
ctagacatccgcagcaagaa

SEQ ID NO: 11963 - DNA, 20 bp, Artificial Sequence
  Synthetic: descartes_7876_NTC
cgttgggcgtgatttcgaac

SEQ ID NO: 11964 - DNA, 20 bp, Artificial Sequence
  Synthetic: descartes_7877_NTC
cgtaatagacgctactgacc

SEQ ID NO: 11965 - DNA, 20 bp, Artificial Sequence
  Synthetic: descartes_7878_NTC
taactatagggctcaaactt

SEQ ID NO: 11966 - DNA, 20 bp, Artificial Sequence
  Synthetic: descartes_7879_NTC
ctaactacgtagaccctggc

SEQ ID NO: 11967 - DNA, 20 bp, Artificial Sequence
  Synthetic: descartes_7880_NTC
tgggctcgggggtcaacttg

SEQ ID NO: 11968 - DNA, 20 bp, Artificial Sequence
  Synthetic: descartes_7881_NTC
tacccatcgagagcttagac

SEQ ID NO: 11969 - DNA, 20 bp, Artificial Sequence
  Synthetic: descartes_7882_NTC
atcgcttaggattgactcga

SEQ ID NO: 11970 - DNA, 20 bp, Artificial Sequence
  Synthetic: descartes_7883_NTC
cctgtgcctgatcctcccac

SEQ ID NO: 11971 - DNA, 20 bp, Artificial Sequence
  Synthetic: descartes_7884_NTC
tttcaaagtgcgctatgtta

SEQ ID NO: 11972 - DNA, 20 bp, Artificial Sequence
  Synthetic: descartes_7885_NTC
ctcgggactactttggacat

SEQ ID NO: 11973 - DNA, 20 bp, Artificial Sequence
  Synthetic: descartes_7886_NTC
acaggcatgccgaatgaagc

SEQ ID NO: 11974 - DNA, 20 bp, Artificial Sequence
  Synthetic: descartes_7887_NTC
acttttttgacggaggaccg

SEQ ID NO: 11975 - DNA, 20 bp, Artificial Sequence
  Synthetic: descartes_7888_NTC
tctggtccactcgataggga

SEQ ID NO: 11976 - DNA, 20 bp, Artificial Sequence
  Synthetic: descartes_7889_NTC
cactttagggtatctgattc

SEQ ID NO: 11977 - DNA, 20 bp, Artificial Sequence
  Synthetic: descartes_7890_NTC
ctgtgcgagggctggcggcc

SEQ ID NO: 11978 - DNA, 20 bp, Artificial Sequence
  Synthetic: descartes_7891_NTC
atactcttagaggcatgacg

SEQ ID NO: 11979 - DNA, 20 bp, Artificial Sequence
  Synthetic: descartes_7892_NTC
gctatggcgctaacgcggcg

SEQ ID NO: 11980 - DNA, 20 bp, Artificial Sequence
  Synthetic: descartes_7893_NTC
gtaatccctgattgcgagcc

SEQ ID NO: 11981 - DNA, 20 bp, Artificial Sequence
  Synthetic: descartes_7894_NTC
acattggacgaactgcgggg

SEQ ID NO: 11982 - DNA, 20 bp, Artificial Sequence
  Synthetic: descartes_7895_NTC
tgctagtatatcgtcgtttt

SEQ ID NO: 11983 - DNA, 20 bp, Artificial Sequence
  Synthetic: descartes_7896_NTC
tttgtctgtgctccgctaag

SEQ ID NO: 11984 - DNA, 20 bp, Artificial Sequence
  Synthetic: descartes_7897_NTC
tagcgcctcattgcctatga

SEQ ID NO: 11985 - DNA, 20 bp, Artificial Sequence
  Synthetic: descartes_7898_NTC
ttctacacggaggaaagcgc

SEQ ID NO: 11986 - DNA, 20 bp, Artificial Sequence
  Synthetic: descartes_7899_NTC
gggactgacttcattctgag

SEQ ID NO: 11987 - DNA, 20 bp, Artificial Sequence
  Synthetic: descartes_7900_NTC
tctgctggggagtttcgggg

SEQ ID NO: 11988 - DNA, 20 bp, Artificial Sequence
  Synthetic: descartes_7901_NTC
tttcacccggatgggacaca

SEQ ID NO: 11989 - DNA, 20 bp, Artificial Sequence
  Synthetic: descartes_7902_NTC
cttttcccatctcgggccgg

SEQ ID NO: 11990 - DNA, 20 bp, Artificial Sequence
  Synthetic: descartes_7903_NTC
agcgtcgaaatagcgtgaac

SEQ ID NO: 11991 - DNA, 20 bp, Artificial Sequence
  Synthetic: descartes_7904_NTC
gtgtctttggaggagcttgt

SEQ ID NO: 11992 - DNA, 20 bp, Artificial Sequence
  Synthetic: descartes_7905_NTC
ctggattaggtagggtgctg

SEQ ID NO: 11993 - DNA, 20 bp, Artificial Sequence
  Synthetic: descartes_7906_NTC
ggtacattacaaataactat

SEQ ID NO: 11994 - DNA, 20 bp, Artificial Sequence
  Synthetic: descartes_7907_NTC
acagggataagcttcgaaag

SEQ ID NO: 11995 - DNA, 20 bp, Artificial Sequence
  Synthetic: descartes_7908_NTC
tctctgcactcgttacgagg

SEQ ID NO: 11996 - DNA, 20 bp, Artificial Sequence
  Synthetic: descartes_7909_NTC
aagtttatatactcagggca

SEQ ID NO: 11997 - DNA, 20 bp, Artificial Sequence
  Synthetic: descartes_7910_NTC
ccgggacgctcacactccat

SEQ ID NO: 11998 - DNA, 20 bp, Artificial Sequence
  Synthetic: descartes_7911_NTC
aggcgtgaatttggtatcgc

SEQ ID NO: 11999 - DNA, 20 bp, Artificial Sequence
  Synthetic: descartes_7912_NTC
tcctcgtagttctgctatat

SEQ ID NO: 12000 - DNA, 20 bp, Artificial Sequence
  Synthetic: descartes_7913_NTC
gagttgtataaatactcggg

SEQ ID NO: 12001 - DNA, 20 bp, Artificial Sequence
  Synthetic: descartes_7914_NTC
cctgctctctaccttacgca

SEQ ID NO: 12002 - DNA, 20 bp, Artificial Sequence
  Synthetic: descartes_7915_NTC
ggactccggtcgtccccatc

SEQ ID NO: 12003 - DNA, 20 bp, Artificial Sequence
  Synthetic: descartes_7916_NTC
atacaattcgggtgaccgca

SEQ ID NO: 12004 - DNA, 20 bp, Artificial Sequence
  Synthetic: descartes_7917_NTC
ctagatatcggtggccgctt

SEQ ID NO: 12005 - DNA, 20 bp, Artificial Sequence
  Synthetic: descartes_7918_NTC
tcgctgtttgctcgtataag

SEQ ID NO: 12006 - DNA, 20 bp, Artificial Sequence
  Synthetic: descartes_7919_NTC
attcggccggactccacgcg

SEQ ID NO: 12007 - DNA, 20 bp, Artificial Sequence
  Synthetic: descartes_7920_NTC
acatctggttctgcccgcat

SEQ ID NO: 12008 - DNA, 20 bp, Artificial Sequence
  Synthetic: descartes_7921_NTC
gagacatgggatataaaagc

SEQ ID NO: 12009 - DNA, 20 bp, Artificial Sequence
  Synthetic: descartes_7922_NTC
tcctaatacgtagtaggttt

SEQ ID NO: 12010 - DNA, 20 bp, Artificial Sequence
  Synthetic: descartes_7923_NTC
gacgctattatgaaagttcg

SEQ ID NO: 12011 - DNA, 20 bp, Artificial Sequence
  Synthetic: descartes_7924_NTC
tctgctatgcattaagctga

SEQ ID NO: 12012 - DNA, 20 bp, Artificial Sequence
  Synthetic: descartes_7925_NTC
ggttatgagggttacggtta

SEQ ID NO: 12013 - DNA, 20 bp, Artificial Sequence
  Synthetic: descartes_7926_NTC
cccacttgctggggcctatc

SEQ ID NO: 12014 - DNA, 20 bp, Artificial Sequence
  Synthetic: descartes_7927_NTC
gtctagcgtgacatgtttgc

SEQ ID NO: 12015 - DNA, 20 bp, Artificial Sequence
  Synthetic: descartes_7928_NTC
gttgtagaacagatcccaat

SEQ ID NO: 12016 - DNA, 20 bp, Artificial Sequence
  Synthetic: descartes_7929_NTC
catctcaattcgtgggcgct

SEQ ID NO: 12017 - DNA, 20 bp, Artificial Sequence
  Synthetic: descartes_7930_NTC
gcagtttcctcaatgacccc

SEQ ID NO: 12018 - DNA, 20 bp, Artificial Sequence
  Synthetic: descartes_7931_NTC
ccgtattgctggcaagtcca

SEQ ID NO: 12019 - DNA, 20 bp, Artificial Sequence
  Synthetic: descartes_7932_NTC
atatgtctatagactctcta

SEQ ID NO: 12020 - DNA, 20 bp, Artificial Sequence
  Synthetic: descartes_7933_NTC
agctggctagtgcgaccgtt

SEQ ID NO: 12021 - DNA, 20 bp, Artificial Sequence
  Synthetic: descartes_7934_NTC
acgcttaaaagccggcagta

SEQ ID NO: 12022 - DNA, 20 bp, Artificial Sequence
  Synthetic: descartes_7935_NTC
gcaagtggtagttgtgctgg

SEQ ID NO: 12023 - DNA, 20 bp, Artificial Sequence
  Synthetic: descartes_7936_NTC
attggctgcggtgacataga

SEQ ID NO: 12024 - DNA, 20 bp, Artificial Sequence
  Synthetic: descartes_7937_NTC
aacaaccaatcttttaaacg

SEQ ID NO: 12025 - DNA, 20 bp, Artificial Sequence
  Synthetic: descartes_7938_NTC
ctcctgccggggcggccggt

SEQ ID NO: 12026 - DNA, 20 bp, Artificial Sequence
  Synthetic: descartes_7939_NTC
caatttaagtcactcctcct

SEQ ID NO: 12027 - DNA, 20 bp, Artificial Sequence
  Synthetic: descartes_7940_NTC
catttaagagtctatttaac

SEQ ID NO: 12028 - DNA, 20 bp, Artificial Sequence
  Synthetic: descartes_7941_NTC
cctacaccttcgtacgtatg

SEQ ID NO: 12029 - DNA, 20 bp, Artificial Sequence
  Synthetic: descartes_7942_NTC
cctcactgacgcatcgattg

SEQ ID NO: 12030 - DNA, 20 bp, Artificial Sequence
  Synthetic: descartes_7943_NTC
gacatgtagttccaacgtcg

SEQ ID NO: 12031 - DNA, 20 bp, Artificial Sequence
  Synthetic: descartes_7944_NTC
ttgggggttcaggcatcaat

SEQ ID NO: 12032 - DNA, 20 bp, Artificial Sequence
  Synthetic: descartes_7945_NTC
catcccttgccaagtgttga

SEQ ID NO: 12033 - DNA, 20 bp, Artificial Sequence
  Synthetic: descartes_7946_NTC
ataccaagacgtccacgcgt

SEQ ID NO: 12034 - DNA, 20 bp, Artificial Sequence
  Synthetic: descartes_7947_NTC
caatagtccacggtaaaatg

SEQ ID NO: 12035 - DNA, 20 bp, Artificial Sequence
  Synthetic: descartes_7948_NTC
ttgtagatgacacgatgcga

SEQ ID NO: 12036 - DNA, 20 bp, Artificial Sequence
  Synthetic: descartes_7949_NTC
taggacgacagtcccagtaa

SEQ ID NO: 12037 - DNA, 20 bp, Artificial Sequence
  Synthetic: descartes_7950_NTC
tcctagtccacacgcgaatg

SEQ ID NO: 12038 - DNA, 20 bp, Artificial Sequence
  Synthetic: descartes_7951_NTC
cgctctcgagccggtgactg

SEQ ID NO: 12039 - DNA, 20 bp, Artificial Sequence
  Synthetic: descartes_7952_NTC
tggcaataggtctgcggcca

SEQ ID NO: 12040 - DNA, 20 bp, Artificial Sequence
  Synthetic: descartes_7953_NTC
agtttttcgactggcttgct

SEQ ID NO: 12041 - DNA, 20 bp, Artificial Sequence
  Synthetic: descartes_7954_NTC
acgaagtactggccagcaaa

SEQ ID NO: 12042 - DNA, 20 bp, Artificial Sequence
  Synthetic: descartes_7955_NTC
tagctactagtgggttaagg

SEQ ID NO: 12043 - DNA, 20 bp, Artificial Sequence
  Synthetic: descartes_7956_NTC
ttacgaagggggaacagatt

SEQ ID NO: 12044 - DNA, 20 bp, Artificial Sequence
  Synthetic: descartes_7957_NTC
gggcatcatacgcgttacta

SEQ ID NO: 12045 - DNA, 20 bp, Artificial Sequence
  Synthetic: descartes_7958_NTC
ccctctaagccatgaactca

SEQ ID NO: 12046 - DNA, 20 bp, Artificial Sequence
  Synthetic: descartes_7959_NTC
agttcgttgagatggtactg

SEQ ID NO: 12047 - DNA, 20 bp, Artificial Sequence
  Synthetic: descartes_7960_NTC
atagtctcattggtcaatgg

SEQ ID NO: 12048 - DNA, 20 bp, Artificial Sequence
  Synthetic: descartes_7961_NTC
tcatggcgttgagagcagag

SEQ ID NO: 12049 - DNA, 20 bp, Artificial Sequence
  Synthetic: descartes_7962_NTC
cgatgggtaaagttaagccc

SEQ ID NO: 12050 - DNA, 20 bp, Artificial Sequence
  Synthetic: descartes_7963_NTC
tggcgaagatcgtactctgt

SEQ ID NO: 12051 - DNA, 20 bp, Artificial Sequence
  Synthetic: descartes_7964_NTC
gatttggcgtgttcgtacct

SEQ ID NO: 12052 - DNA, 20 bp, Artificial Sequence
  Synthetic: descartes_7965_NTC
acgaggaccgccggcccacg

SEQ ID NO: 12053 - DNA, 20 bp, Artificial Sequence
  Synthetic: descartes_7966_NTC
gttctcatattgctttgttt

SEQ ID NO: 12054 - DNA, 20 bp, Artificial Sequence
  Synthetic: descartes_7967_NTC
tatttctcattccggacttc

SEQ ID NO: 12055 - DNA, 20 bp, Artificial Sequence
  Synthetic: descartes_7968_NTC
gaattgccacgctgtgtcga

SEQ ID NO: 12056 - DNA, 20 bp, Artificial Sequence
  Synthetic: descartes_7969_NTC
gagacggtgagccgtcgtgg

SEQ ID NO: 12057 - DNA, 20 bp, Artificial Sequence
  Synthetic: descartes_7970_NTC
tattcggatcaggaatcttg

SEQ ID NO: 12058 - DNA, 20 bp, Artificial Sequence
  Synthetic: descartes_7971_NTC
cgcatgacatctgaggaacg

SEQ ID NO: 12059 - DNA, 20 bp, Artificial Sequence
  Synthetic: descartes_7972_NTC
ttcacggaaacacaggttac

SEQ ID NO: 12060 - DNA, 20 bp, Artificial Sequence
  Synthetic: descartes_7973_NTC
ttcatcacacaagaggggcg

SEQ ID NO: 12061 - DNA, 20 bp, Artificial Sequence
  Synthetic: descartes_7974_NTC
actctccaaggtggcagggt

SEQ ID NO: 12062 - DNA, 20 bp, Artificial Sequence
  Synthetic: descartes_7975_NTC
atcgtagcagagtgtgccaa

SEQ ID NO: 12063 - DNA, 20 bp, Artificial Sequence
  Synthetic: descartes_7976_NTC
agcgggagcaaggacgtcga

SEQ ID NO: 12064 - DNA, 20 bp, Artificial Sequence
  Synthetic: descartes_7977_NTC
cccacagaagccacagtgaa

SEQ ID NO: 12065 - DNA, 20 bp, Artificial Sequence
  Synthetic: descartes_7978_NTC
taagcgaaacattactatgg

SEQ ID NO: 12066 - DNA, 20 bp, Artificial Sequence
  Synthetic: descartes_7979_NTC
gaaatgaaacccactcgacc

SEQ ID NO: 12067 - DNA, 20 bp, Artificial Sequence
  Synthetic: descartes_7980_NTC
gcccggcaatcatgctgtgc

SEQ ID NO: 12068 - DNA, 20 bp, Artificial Sequence
  Synthetic: descartes_7981_NTC
gaatctgcgccatggctaac

SEQ ID NO: 12069 - DNA, 20 bp, Artificial Sequence
  Synthetic: descartes_7982_NTC
gtatcgtgccgtcaattcgg

SEQ ID NO: 12070 - DNA, 20 bp, Artificial Sequence
  Synthetic: descartes_7983_NTC
ggcttcgatgcggttgcacc

SEQ ID NO: 12071 - DNA, 20 bp, Artificial Sequence
  Synthetic: descartes_7984_NTC
ggaaagacggagtttgaaat

SEQ ID NO: 12072 - DNA, 20 bp, Artificial Sequence
  Synthetic: descartes_7985_NTC
gtcacaagagtagatgttat

SEQ ID NO: 12073 - DNA, 20 bp, Artificial Sequence
  Synthetic: descartes_7986_NTC
gcactagattgcttcctatg

SEQ ID NO: 12074 - DNA, 20 bp, Artificial Sequence
  Synthetic: descartes_7987_NTC
ccgtgatatgaacaccgtgc

SEQ ID NO: 12075 - DNA, 20 bp, Artificial Sequence
  Synthetic: descartes_7988_NTC
agaattgacgcggccaaagc

SEQ ID NO: 12076 - DNA, 20 bp, Artificial Sequence
  Synthetic: descartes_7989_NTC
cggggtgaaagtatttgtat

SEQ ID NO: 12077 - DNA, 20 bp, Artificial Sequence
  Synthetic: descartes_7990_NTC
attcgaacaacactcgatta

SEQ ID NO: 12078 - DNA, 20 bp, Artificial Sequence
  Synthetic: descartes_7991_NTC
cgtagctaagagagacgaac

SEQ ID NO: 12079 - DNA, 20 bp, Artificial Sequence
  Synthetic: descartes_7992_NTC
ttctcccattgcgttagaga

SEQ ID NO: 12080 - DNA, 20 bp, Artificial Sequence
  Synthetic: descartes_7993_NTC
ctgtagttttttcgatgcac

SEQ ID NO: 12081 - DNA, 20 bp, Artificial Sequence
  Synthetic: descartes_7994_NTC
atttagcatcaccgtttcaa

SEQ ID NO: 12082 - DNA, 20 bp, Artificial Sequence
  Synthetic: descartes_7995_NTC
atttcaaaagctctaggcgt

SEQ ID NO: 12083 - DNA, 20 bp, Artificial Sequence
  Synthetic: descartes_7996_NTC
gtcatggccatctcatgata

SEQ ID NO: 12084 - DNA, 20 bp, Artificial Sequence
  Synthetic: descartes_7997_NTC
aggaagtgatcacagactcg

SEQ ID NO: 12085 - DNA, 20 bp, Artificial Sequence
  Synthetic: descartes_7998_NTC
gaacaaaattagccagccgc

SEQ ID NO: 12086 - DNA, 20 bp, Artificial Sequence
  Synthetic: descartes_7999_NTC
ataaaatgggtacaaatgtt

SEQ ID NO: 12087 - DNA, 20 bp, Artificial Sequence
  Synthetic: descartes_8000_NTC
agggataagatcggaccagg

SEQ ID NO: 12088 - DNA, 20 bp, Artificial Sequence
  Synthetic: descartes_8001_NTC
aaatgacggcagcattatta

SEQ ID NO: 12089 - DNA, 20 bp, Artificial Sequence
  Synthetic: descartes_8002_NTC
gtatatcaaccgcctgcaag

SEQ ID NO: 12090 - DNA, 20 bp, Artificial Sequence
  Synthetic: descartes_8003_NTC
ggcataccaaccgctcggaa

SEQ ID NO: 12091 - DNA, 20 bp, Artificial Sequence
  Synthetic: descartes_8004_NTC
aatatggaacagcgaacaat

SEQ ID NO: 12092 - DNA, 20 bp, Artificial Sequence
  Synthetic: descartes_8005_NTC
agacccatttactggtgcct

SEQ ID NO: 12093 - DNA, 20 bp, Artificial Sequence
  Synthetic: descartes_8006_NTC
ccatattcttcatatacgag

SEQ ID NO: 12094 - DNA, 20 bp, Artificial Sequence
  Synthetic: descartes_8007_NTC
ctaggcgatacccccatagc

SEQ ID NO: 12095 - DNA, 20 bp, Artificial Sequence
  Synthetic: descartes_8008_NTC
gtcacaggcaccacagaacc

SEQ ID NO: 12096 - DNA, 20 bp, Artificial Sequence
  Synthetic: descartes_8009_NTC
cttgtcttgtccatcacgtg

SEQ ID NO: 12097 - DNA, 20 bp, Artificial Sequence
  Synthetic: descartes_8010_NTC
tagtttcgtaaacggacagc

SEQ ID NO: 12098 - DNA, 20 bp, Artificial Sequence
  Synthetic: descartes_8011_NTC
gcatgagagtaattgtacta

SEQ ID NO: 12099 - DNA, 20 bp, Artificial Sequence
  Synthetic: descartes_8012_NTC
tccctatgtgtgttaggatt

SEQ ID NO: 12100 - DNA, 20 bp, Artificial Sequence
  Synthetic: descartes_8013_NTC
tgtggggattgcaatcgcgc

SEQ ID NO: 12101 - DNA, 20 bp, Artificial Sequence
  Synthetic: descartes_8014_NTC
cgctcacactccgaagagaa

SEQ ID NO: 12102 - DNA, 20 bp, Artificial Sequence
  Synthetic: descartes_8015_NTC
tatatctagatttctgatgg

SEQ ID NO: 12103 - DNA, 20 bp, Artificial Sequence
  Synthetic: descartes_8016_NTC
acgtataacatccattgatg

SEQ ID NO: 12104 - DNA, 20 bp, Artificial Sequence
  Synthetic: descartes_8017_NTC
atgatgtggtctagccatta

SEQ ID NO: 12105 - DNA, 20 bp, Artificial Sequence
  Synthetic: descartes_8018_NTC
ttcaatctagcgtacaattg

SEQ ID NO: 12106 - DNA, 20 bp, Artificial Sequence
  Synthetic: descartes_8019_NTC
ttacacgcgaagctgtcgtg

SEQ ID NO: 12107 - DNA, 20 bp, Artificial Sequence
  Synthetic: descartes_8020_NTC
acatccctgggcaatcgggt

SEQ ID NO: 12108 - DNA, 20 bp, Artificial Sequence
  Synthetic: descartes_8021_NTC
ttgttatgaggctcacgatc

SEQ ID NO: 12109 - DNA, 20 bp, Artificial Sequence
  Synthetic: descartes_8022_NTC
ggtggttgactggacctgga

SEQ ID NO: 12110 - DNA, 20 bp, Artificial Sequence
  Synthetic: descartes_8023_NTC
agagtaagtcttaggatgaa

SEQ ID NO: 12111 - DNA, 20 bp, Artificial Sequence
  Synthetic: descartes_8024_NTC
agattcgcgactctcgagag

SEQ ID NO: 12112 - DNA, 20 bp, Artificial Sequence
  Synthetic: descartes_8025_NTC
gtggtcaagagttcctgcag

SEQ ID NO: 12113 - DNA, 20 bp, Artificial Sequence
  Synthetic: descartes_8026_NTC
caaaataagctgcacatggg

SEQ ID NO: 12114 - DNA, 20 bp, Artificial Sequence
  Synthetic: descartes_8027_NTC
ccagccaaaatgtacgtcgc

SEQ ID NO: 12115 - DNA, 20 bp, Artificial Sequence
  Synthetic: descartes_8028_NTC
taatacgctccgccgcaggg

SEQ ID NO: 12116 - DNA, 20 bp, Artificial Sequence
  Synthetic: descartes_8029_NTC
aactcgtagtgattgagagc

SEQ ID NO: 12117 - DNA, 20 bp, Artificial Sequence
  Synthetic: descartes_8030_NTC
aaaacagatgagtctcaact

SEQ ID NO: 12118 - DNA, 20 bp, Artificial Sequence
  Synthetic: descartes_8031_NTC
ggcgctcggaatccctgata

SEQ ID NO: 12119 - DNA, 20 bp, Artificial Sequence
  Synthetic: descartes_8032_NTC
cgacgtgatcgcgtggcagc

SEQ ID NO: 12120 - DNA, 20 bp, Artificial Sequence
  Synthetic: descartes_8033_NTC
caattgagatttcgataggc

SEQ ID NO: 12121 - DNA, 20 bp, Artificial Sequence
  Synthetic: descartes_8034_NTC
gaggatgagttaggaacagt

SEQ ID NO: 12122 - DNA, 20 bp, Artificial Sequence
  Synthetic: descartes_8035_NTC
aagaaccacgaatgttgaaa

SEQ ID NO: 12123 - DNA, 20 bp, Artificial Sequence
  Synthetic: descartes_8036_NTC
ttccaatgctaccctatcgt

SEQ ID NO: 12124 - DNA, 20 bp, Artificial Sequence
  Synthetic: descartes_8037_NTC
cataaacattacattagtct

SEQ ID NO: 12125 - DNA, 20 bp, Artificial Sequence
  Synthetic: descartes_8038_NTC
cggaaactttatccagtact

SEQ ID NO: 12126 - DNA, 20 bp, Artificial Sequence
  Synthetic: descartes_8039_NTC
gcggctgagacttctgggct

SEQ ID NO: 12127 - DNA, 20 bp, Artificial Sequence
  Synthetic: descartes_8040_NTC
ttgatacgtgatgaacactc

SEQ ID NO: 12128 - DNA, 20 bp, Artificial Sequence
  Synthetic: descartes_8041_NTC
tcctagtaagtaccgtccca

SEQ ID NO: 12129 - DNA, 20 bp, Artificial Sequence
  Synthetic: descartes_8042_NTC
ctctatattttgtgctagca

SEQ ID NO: 12130 - DNA, 20 bp, Artificial Sequence
  Synthetic: descartes_8043_NTC
aacctctagaacttcacctg

SEQ ID NO: 12131 - DNA, 20 bp, Artificial Sequence
  Synthetic: descartes_8044_NTC
ggcgttttccctttaacaac

SEQ ID NO: 12132 - DNA, 20 bp, Artificial Sequence
  Synthetic: descartes_8045_NTC
ctcgatgtgcttcggcgata

SEQ ID NO: 12133 - DNA, 20 bp, Artificial Sequence
  Synthetic: descartes_8046_NTC
ttctacatgcgagtcactat

SEQ ID NO: 12134 - DNA, 20 bp, Artificial Sequence
  Synthetic: descartes_8047_NTC
gtatcgtttctgaaataaag

SEQ ID NO: 12135 - DNA, 20 bp, Artificial Sequence
  Synthetic: crTRAC
gagtctctcagctggtacac

SEQ ID NO: 12136 - DNA, 21 bp, Artificial sequence
  adaptor
taatttctactaagtgtagat

SEQ ID NO: 12137 - DNA, 24 bp, Artificial Sequence
  Adaptor
ggtttactcgatataaggccttga

SEQ ID NO: 12138 - DNA, 21 bp, Artificial Sequence
  Adaptor
gaaaggtcgcccgacgcccgg

SEQ ID NO: 12139 - DNA, 79 bp, Artificial Sequence
  MIPs probe
  misc_feature (52)..(57): n is a, c, g, or t
agggagacaggaaggccagaacttcagcttcccgatatccgacggtagtgtnnnnnnggtgtgcagacgcttgtgcagt

SEQ ID NO: 12140 - DNA, 81 bp, Artificial Sequence
  MIPs probe
  misc_feature (60)..(65): n is a, c, g, or t
gcacctgaaactgcacaagcgtctgcacacttcagcttcccgatatccgacggtagtgtnnnnnntcttctggccttcctg

SEQ ID NO: 12141 - DNA, 81 bp, Artificial Sequence
  MIPs probe
  misc_feature (60)..(65): n is a, c, g, or t
cacctgaaactgcacaagcgtctgcacaccttcagcttcccgatatccgacggtagtgtnnnnnncttctggccttcctgt

SEQ ID NO: 12142 - DNA, 78 bp, Artificial Sequence
  MIPs probe
  misc_feature (56)..(61): n is a, c, g, or t
attgacaagaagattggggacctggcttcagcttcccgatatccgacggtagtgtnnnnnntgactctgtggacagag

SEQ ID NO: 12143 - DNA, 80 bp, Artificial Sequence
  Artificial Sequence
  misc_feature (59)..(64): n is a, c, g, or t
gcggaggcatccttaccaaggaatctgccttcagcttcccgatatccgacggtagtgtnnnnnnctgtgaggtttcaggg

SEQ ID NO: 12144 - DNA, 81 bp, Artificial Sequence
  MIPs probe
  misc_feature (60)..(65): n is a, c, g, or t
accacccctgggattctggtgctgatggccttcagcttcccgatatccgacggtagtgtnnnnnnctttcctttctcttcc

SEQ ID NO: 12145 - DNA, 81 bp, Artificial Sequence
  MIPs probe
  misc_feature (60)..(65): n is a, c, g, or t
gacaagaagattggggacctggtgccaaacttcagcttcccgatatccgacggtagtgtnnnnnngtggacagaggctgag

SEQ ID NO: 12146 - DNA, 80 bp, Artificial Sequence
  MIPs probe
  misc_feature (53)..(58): n is a, c, g, or t
cccctgggattctggtgctgatcttcagcttcccgatatccgacggtagtgtnnnnnnggcctttcctttctcttccagg

SEQ ID NO: 12147 - DNA, 81 bp, Artificial Sequence
  MIPs probe
  misc_feature (60)..(65): n is a, c, g, or t
gctccttctgagaggctatgactaatacacttcagcttcccgatatccgacggtagtgtnnnnnncagcctctgtccacag

SEQ ID NO: 12148 - DNA, 81 bp, Artificial Sequence
  MIPs probe
  misc_feature (51)..(56): n is a, c, g, or t
ggtaaggatgcctccgcctgcttcagcttcccgatatccgacggtagtgtnnnnnnttgaatagagcaatcaattatttac

SEQ ID NO: 12149 - DNA, 81 bp, Artificial Sequence
  MIPs probe
  misc_feature (55)..(60): n is a, c, g, or t
taaggatgcctccgcctgaaccgacttcagcttcccgatatccgacggtagtgtnnnnnnagagcaatcaattatttactg

SEQ ID NO: 12150 - DNA, 78 bp, Artificial Sequence
  MIPs probe
  misc_feature (49)..(54): n is a, c, g, or t
cccacaggggacaccgtacttcagcttcccgatatccgacggtagtgtnnnnnnttacaattcatgccgtaggggggc

SEQ ID NO: 12151 - DNA, 81 bp, Artificial Sequence
  MIPs probe
  misc_feature (53)..(58): n is a, c, g, or t
gtgagggctggagctcttgaggcttcagcttcccgatatccgacggtagtgtnnnnnngggtagtgagcgttgtacgaggg

SEQ ID NO: 12152 - DNA, 80 bp, Artificial Sequence
  Artificial Sequence
  misc_feature (59)..(64): n is a, c, g, or t
gtaagcgtaggagtcccggtgctcttgacttcagcttcccgatatccgacggtagtgtnnnnnnttcatgctgctcacag

SEQ ID NO: 12153 - DNA, 81 bp, Artificial Sequence
  MIPs probe
  misc_feature (60)..(65): n is a, c, g, or t
cccattaaatgttaggaaaaaatggagctcttcagcttcccgatatccgacggtagtgtnnnnnntcctgtgttttttcct

SEQ ID NO: 12154 - DNA, 81 bp, Artificial Sequence
  MIPs probe
  misc_feature (58)..(63): n is a, c, g, or t
ggagctaaaagagctgggtggctcacccttcagcttcccgatatccgacggtagtgtnnnnnnggttattggagtgatgag

SEQ ID NO: 12155 - DNA, 81 bp, Artificial Sequence
  MIPs probe
  misc_feature (60)..(65): n is a, c, g, or t
ggaaatatttttggagggtaagtaagggacttcagcttcccgatatccgacggtagtgtnnnnnnttgaaaagattggtta

SEQ ID NO: 12156 - DNA, 81 bp, Artificial Sequence
  MIPs probe
  misc_feature (49)..(54): n is a, c, g, or t
ccaagggcagcccaggcgcttcagcttcccgatatccgacggtagtgtnnnnnntgtttctttgcaaagacactttcaggc

SEQ ID NO: 12157 - DNA, 81 bp, Artificial Sequence
  MIPs probe
  misc_feature (56)..(61): n is a, c, g, or t
ggaatggactcctctcctcagggtgcttcagcttcccgatatccgacggtagtgtnnnnnnccgaatcaatgaagaaatcg

SEQ ID NO: 12158 - DNA, 81 bp, Artificial Sequence
  MIPs probe
  misc_feature (59)..(64): n is a, c, g, or t
tggggaatggactcctctcctcagggtgcttcagcttcccgatatccgacggtagtgtnnnnnnccgaatcaatgaagaaa

SEQ ID NO: 12159 - DNA, 79 bp, Artificial Sequence
  MIPs probe
  misc_feature (51)..(56): n is a, c, g, or t
cgcttgtgcagtttcaggtgcttcagcttcccgatatccgacggtagtgtnnnnnngtcactgatgtcaaacttctcga

SEQ ID NO: 12160 - DNA, 80 bp, Artificial Sequence
  MIPs probe
  misc_feature (56)..(61): n is a, c, g, or t
gggtgaacttggcagggcacaccttcttcagcttcccgatatccgacggtagtgtnnnnnngattcgggtcagatcttcc

SEQ ID NO: 12161 - DNA, 81 bp, Artificial Sequence
  MIPs probe
  misc_feature (60)..(65): n is a, c, g, or t
gctcgaggacgtggaggatgacatcagtgcttcagcttcccgatatccgacggtagtgtnnnnnncccacaagtgctccca

SEQ ID NO: 12162 - DNA, 78 bp, Artificial Sequence
  MIPs probe
  misc_feature (54)..(59): n is a, c, g, or t
tctggagtggagacctgctctgtcttcagcttcccgatatccgacggtagtgtnnnnnnatgctgggggccgagggtg

SEQ ID NO: 12163 - DNA, 80 bp, Artificial Sequence
  MIPs probe
  misc_feature (56)..(61): n is a, c, g, or t
gctctgtcaggagtgggaggaagggcttcagcttcccgatatccgacggtagtgtnnnnnngagggacaggaggtgggag

SEQ ID NO: 12164 - DNA, 78 bp, Artificial Sequence
  MIPs probe
  misc_feature (57)..(62): n is a, c, g, or t
gccatcactgaagtgaacccctgggacttcagcttcccgatatccgacggtagtgtnnnnnntgggttcagtgggtgg

SEQ ID NO: 12165 - DNA, 81 bp, Artificial Sequence
  MIPs probe
  misc_feature (53)..(58): n is a, c, g, or t
gcctgcagttgaggctttatggcttcagcttcccgatatccgacggtagtgtnnnnnncgagaacaaaatagtgtctcttg

SEQ ID NO: 12166 - DNA, 81 bp, Artificial Sequence
  MIPs probe
  misc_feature (60)..(65): n is a, c, g, or t
cctagataacgtggagggcctgcttcggacttcagcttcccgatatccgacggtagtgtnnnnnngtgtggactggggaag

SEQ ID NO: 12167 - DNA, 80 bp, Artificial Sequence
  MIPs probe
  misc_feature (59)..(64): n is a, c, g, or t
gaggctttatggtaataatggcggcttccttcagcttcccgatatccgacggtagtgtnnnnnntctcttgatccatccg

SEQ ID NO: 12168 - DNA, 81 bp, Artificial Sequence
  MIPs probe
  misc_feature (55)..(60): n is a, c, g, or t
ggggatggtacctctaggcacttccttcagcttcccgatatccgacggtagtgtnnnnnngtgttatgaggatcaagttct

SEQ ID NO: 12169 - DNA, 80 bp, Artificial Sequence
  MIPs probe
  misc_feature (58)..(63): n is a, c, g, or t
attggtttcattctaaccctggtgactcttcagcttcccgatatccgacggtagtgtnnnnnntctcctggtcttgggtc

SEQ ID NO: 12170 - DNA, 81 bp, Artificial Sequence
  MIPs probe
  misc_feature (60)..(65): n is a, c, g, or t
acactgagctgatgactgatttcattctccttcagcttcccgatatccgacggtagtgtnnnnnngtcctctcttccaaat

SEQ ID NO: 12171 - DNA, 81 bp, Artificial Sequence
  MIPs probe
  misc_feature (60)..(65): n is a, c, g, or t
cggagaatctttgggcagttcatcatgcgcttcagcttcccgatatccgacggtagtgtnnnnnntagataacgtggaggg

SEQ ID NO: 12172 - DNA, 81 bp, Artificial Sequence
  MIPs probe
  misc_feature (60)..(65): n is a, c, g, or t
gcccacctgtgggagggaggagaagagagcttcagcttcccgatatccgacggtagtgtnnnnnnggatcaagagacacta

SEQ ID NO: 12173 - DNA, 81 bp, Artificial Sequence
  MIPs probe
  misc_feature (60)..(65): n is a, c, g, or t
gaacagtgtcgagaacaaaatagtgtctccttcagcttcccgatatccgacggtagtgtnnnnnntaagggactctcttct

SEQ ID NO: 12174 - DNA, 81 bp, Artificial Sequence
  MIPs probe
  misc_feature (57)..(62): n is a, c, g, or t
atcaatggggctttcagtcgaccggccttcagcttcccgatatccgacggtagtgtnnnnnnccccaagaaagatgttttt

SEQ ID NO: 12175 - DNA, 81 bp, Artificial Sequence
  MIPs probe
  misc_feature (52)..(57): n is a, c, g, or t
ccaggaaccgtgtcagttactcttcagcttcccgatatccgacggtagtgtnnnnnnagaaagcatcatttagaaaaaaag

SEQ ID NO: 12176 - DNA, 81 bp, Artificial Sequence
  MIPs probe
  misc_feature (60)..(65): n is a, c, g, or t
ccaagttacaagttacaagttggaagctccttcagcttcccgatatccgacggtagtgtnnnnnncagtacaaagcactat

SEQ ID NO: 12177 - DNA, 78 bp, Artificial Sequence
  MIPs probe
  misc_feature (57)..(62): n is a, c, g, or t
gcgtggatgcatcacaagaacaccatcttcagcttcccgatatccgacggtagtgtnnnnnncagttctactcatcct

SEQ ID NO: 12178 - DNA, 81 bp, Artificial Sequence
  MIPs probe
  misc_feature (59)..(64): n is a, c, g, or t
atgcattacatacattccagaaaactctcttcagcttcccgatatccgacggtagtgtnnnnnngggttcacagaagactc

SEQ ID NO: 12179 - DNA, 79 bp, Artificial Sequence
  MIPs probe
  misc_feature (58)..(63): n is a, c, g, or t
ataaacacataggatgagtagaactgacttcagcttcccgatatccgacggtagtgtnnnnnntggtgttcttgtgatg

SEQ ID NO: 12180 - DNA, 79 bp, Artificial Sequence
  MIPs probe
  misc_feature (57)..(62): n is a, c, g, or t
ggtcaggagccttgggacaccttttgcttcagcttcccgatatccgacggtagtgtnnnnnngcctagatgccaaagtt

SEQ ID NO: 12181 - DNA, 81 bp, Artificial Sequence
  MIPs probe
  misc_feature (60)..(65): n is a, c, g, or t
gctgtctttctcaaatctttgttcactggcttcagcttcccgatatccgacggtagtgtnnnnnnattccaaaaaaaaaag

SEQ ID NO: 12182 - DNA, 81 bp, Artificial Sequence
  MIPs probe
  misc_feature (60)..(65): n is a, c, g, or t
gcattatttcctagaggggaaaagttttccttcagcttcccgatatccgacggtagtgtnnnnnnttaaactgtgtgtgtc

SEQ ID NO: 12183 - DNA, 81 bp, Artificial Sequence
  MIPs probe
  misc_feature (55)..(60): n is a, c, g, or t
gcactgaggtcgtgctgcattgatcttcagcttcccgatatccgacggtagtgtnnnnnnaacagacctacacataggaca

SEQ ID NO: 12184 - DNA, 81 bp, Artificial Sequence
  MIPs probe
  misc_feature (60)..(65): n is a, c, g, or t
gctagtgtgttgaaccctacagggcactgcttcagcttcccgatatccgacggtagtgtnnnnnncagaggaacataggga

SEQ ID NO: 12185 - DNA, 81 bp, Artificial Sequence
  MIPs probe
  misc_feature (60)..(65): n is a, c, g, or t
gaacgtgatggaaaagatcgtgaatgtcccttcagcttcccgatatccgacggtagtgtnnnnnnagctttaagacaggaa

SEQ ID NO: 12186 - DNA, 81 bp, Artificial Sequence
  MIPs probe
  misc_feature (60)..(65): n is a, c, g, or t
gccacagaggaacatagggaccaacagaccttcagcttcccgatatccgacggtagtgtnnnnnnaactgatgtgcacaaa

SEQ ID NO: 12187 - DNA, 80 bp, Artificial Sequence
  MIPs probe
  misc_feature (59)..(64): n is a, c, g, or t
gccacagaggaacatagggaccaacagacttcagcttcccgatatccgacggtagtgtnnnnnncaactgatgtgcacaa

SEQ ID NO: 12188 - DNA, 81 bp, Artificial Sequence
  MIPs probe
  misc_feature (60)..(65): n is a, c, g, or t
gtactcatacttttcatgcagcctgtccccttcagcttcccgatatccgacggtagtgtnnnnnngaatgtcctatgtgta

SEQ ID NO: 12189 - DNA, 79 bp, Artificial Sequence
  MIPs probe
  misc_feature (52)..(57): n is a, c, g, or t
ggggctttccctgtgggagggcttcagcttcccgatatccgacggtagtgtnnnnnnggggtggcagttcatactttgg

SEQ ID NO: 12190 - DNA, 81 bp, Artificial Sequence
  MIPs probe
  misc_feature (55)..(60): n is a, c, g, or t
ctgccacccctcaacaccactcaccttcagcttcccgatatccgacggtagtgtnnnnnnaagccccaaactcacatcatt

SEQ ID NO: 12191 - DNA, 80 bp, Artificial Sequence
  MIPs probe
  misc_feature (59)..(64): n is a, c, g, or t
gccagaaacaacagcattagggccaaagcttcagcttcccgatatccgacggtagtgtnnnnnnagctctgtggatttct

SEQ ID NO: 12192 - DNA, 81 bp, Artificial Sequence
  MIPs probe
  misc_feature (60)..(65): n is a, c, g, or t
gcgaggatgcggcgaagttacgcccatttcttcagcttcccgatatccgacggtagtgtnnnnnncaggaggaaacaaacc

SEQ ID NO: 12193 - DNA, 81 bp, Artificial Sequence
  MIPs probe
  misc_feature (60)..(65): n is a, c, g, or t
cgagcttccgagccagaactgaagccaggcttcagcttcccgatatccgacggtagtgtnnnnnnaaatggggaaactgaa

SEQ ID NO: 12194 - DNA, 81 bp, Artificial Sequence
  MIPs probe
  misc_feature (56)..(61): n is a, c, g, or t
ctgggaaagccgtaccctagttacccttcagcttcccgatatccgacggtagtgtnnnnnntcctcgctgccggttgcttt

SEQ ID NO: 12195 - DNA, 79 bp, Artificial Sequence
  MIPs probe
  misc_feature (58)..(63): n is a, c, g, or t
gccataaaacattttctttcttgggtgcttcagcttcccgatatccgacggtagtgtnnnnnntaggttctctaacttg

SEQ ID NO: 12196 - DNA, 78 bp, Artificial Sequence
  MIPs probe
  misc_feature (56)..(61): n is a, c, g, or t
gcacaccaaagggattaacccggtgcttcagcttcccgatatccgacggtagtgtnnnnnngtggtacgtgctgcggc

SEQ ID NO: 12197 - DNA, 81 bp, Artificial Sequence
  MIPs probe
  misc_feature (59)..(64): n is a, c, g, or t
gcagcacgtaccacggaggacttattcgcttcagcttcccgatatccgacggtagtgtnnnnnnctttggtgtgcaaatgg

SEQ ID NO: 12198 - DNA, 81 bp, Artificial Sequence
  MIPs probe
  misc_feature (60)..(65): n is a, c, g, or t
cgtcaactttccacggctttgatgaggaccttcagcttcccgatatccgacggtagtgtnnnnnntaatgtaatgagaata

SEQ ID NO: 12199 - DNA, 81 bp, Artificial Sequence
  MIPs probe
  misc_feature (52)..(57): n is a, c, g, or t
atgagggaggctggggtgccccttcagcttcccgatatccgacggtagtgtnnnnnntttgcatttcgtttctcacctttt

SEQ ID NO: 12200 - DNA, 80 bp, Artificial Sequence
  MIPs probe
  misc_feature (59)..(64): n is a, c, g, or t
atctccactgcagctagatggaaatcatcttcagcttcccgatatccgacggtagtgtnnnnnntttcagagggttttgg

SEQ ID NO: 12201 - DNA, 81 bp, Artificial Sequence
  MIPs probe
  misc_feature (60)..(65): n is a, c, g, or t
gacatgagcgaggaaagagatgagggaggcttcagcttcccgatatccgacggtagtgtnnnnnntggtttttccctttgc

SEQ ID NO: 12202 - DNA, 79 bp, Artificial Sequence
  MIPs probe
  misc_feature (50)..(55): n is a, c, g, or t
ggtcattgtgctggttctgcttcagcttcccgatatccgacggtagtgtnnnnnnccacgtcagaaagtgacacgtcaa

SEQ ID NO: 12203 - DNA, 80 bp, Artificial Sequence
  MIPs probe
  misc_feature (59)..(64): n is a, c, g, or t
gacgtggaaccgaataagtcctccgtggcttcagcttcccgatatccgacggtagtgtnnnnnnagtcagagggggatgg

SEQ ID NO: 12204 - DNA, 81 bp, Artificial Sequence
  MIPs probe
  misc_feature (60)..(65): n is a, c, g, or t
gccgtggaaagttgacgtgtcactttctgcttcagcttcccgatatccgacggtagtgtnnnnnnatatatcagaaccagc

SEQ ID NO: 12205 - DNA, 80 bp, Artificial Sequence
  MIPs probe
  misc_feature (58)..(63): n is a, c, g, or t
ggggctccacacggcgactctcatgatcttcagcttcccgatatccgacggtagtgtnnnnnnctgacaacctcaggaag

SEQ ID NO: 12206 - DNA, 81 bp, Artificial Sequence
  MIPs probe
  misc_feature (54)..(59): n is a, c, g, or t
ggcctcaccttcctgaggttgtccttcagcttcccgatatccgacggtagtgtnnnnnntgatcatgagagtcgccgtgtg

SEQ ID NO: 12207 - DNA, 81 bp, Artificial Sequence
  MIPs probe
  misc_feature (60)..(65): n is a, c, g, or t
gctccacacggcgactctcatgatcatagcttcagcttcccgatatccgacggtagtgtnnnnnnaacctcaggaaggtga

SEQ ID NO: 12208 - DNA, 81 bp, Artificial Sequence
  MIPs probe
  misc_feature (58)..(63): n is a, c, g, or t
gtgtggagccccgaactccatgggtttcttcagcttcccgatatccgacggtagtgtnnnnnntcccctcctactacacat

SEQ ID NO: 12209 - DNA, 81 bp, Artificial Sequence
  MIPs probe
  misc_feature (60)..(65): n is a, c, g, or t
aggggagcaggatgttgaggctccacacacttcagcttcccgatatccgacggtagtgtnnnnnnacacggcgactctcat

SEQ ID NO: 12210 - DNA, 78 bp, Artificial Sequence
  MIPs probe
  misc_feature (57)..(62): n is a, c, g, or t
ccatgtgtagtaggaggggagcaggacttcagcttcccgatatccgacggtagtgtnnnnnnatggagttcggggctc

SEQ ID NO: 12211 - DNA, 81 bp, Artificial Sequence
  MIPs probe
  misc_feature (55)..(60): n is a, c, g, or t
gggcaggaccaccttgaattctgccttcagcttcccgatatccgacggtagtgtnnnnnngcttcctgagatcatttggtc

SEQ ID NO: 12212 - DNA, 81 bp, Artificial Sequence
  MIPs probe
  misc_feature (60)..(65): n is a, c, g, or t
gctactggaagtacgggtatgatgggcagcttcagcttcccgatatccgacggtagtgtnnnnnnggaagagggaaggaat

SEQ ID NO: 12213 - DNA, 80 bp, Artificial Sequence
  MIPs probe
  misc_feature (58)..(63): n is a, c, g, or t
gccctgacacactggattggagagcagcttcagcttcccgatatccgacggtagtgtnnnnnngggatggtggaaatagg

SEQ ID NO: 12214 - DNA, 81 bp, Artificial Sequence
  MIPs probe
  misc_feature (60)..(65): n is a, c, g, or t
actactacccccagaacatcaccatgaagcttcagcttcccgatatccgacggtagtgtnnnnnntttccttcctccaacc

SEQ ID NO: 12215 - DNA, 81 bp, Artificial Sequence
  MIPs probe
  misc_feature (60)..(65): n is a, c, g, or t
acgtattgcccaatggggatgggacctaccttcagcttcccgatatccgacggtagtgtnnnnnncttcctctttcctgtc

SEQ ID NO: 12216 - DNA, 81 bp, Artificial Sequence
  MIPs probe
  misc_feature (53)..(58): n is a, c, g, or t
cccaatggggatgggacctacccttcagcttcccgatatccgacggtagtgtnnnnnnttcctctttcctgtcaagtgcct

SEQ ID NO: 12217 - DNA, 80 bp, Artificial Sequence
  MIPs probe
  misc_feature (59)..(64): n is a, c, g, or t
gacgtattgcccaatggggatgggacctcttcagcttcccgatatccgacggtagtgtnnnnnntccttcctctttcctg

SEQ ID NO: 12218 - DNA, 81 bp, Artificial Sequence
  MIPs probe
  misc_feature (60)..(65): n is a, c, g, or t
gcctggatcagcccctcattgtgatctggcttcagcttcccgatatccgacggtagtgtnnnnnncagaacatcaccatga

SEQ ID NO: 12219 - DNA, 78 bp, Artificial Sequence
  MIPs probe
  misc_feature (56)..(61): n is a, c, g, or t
ggaactgggcatgccctgaagtgaccttcagcttcccgatatccgacggtagtgtnnnnnngggaggttctgaagggt

SEQ ID NO: 12220 - DNA, 81 bp, Artificial Sequence
  MIPs probe
  misc_feature (50)..(55): n is a, c, g, or t
ctgcttctccattgacccacttcagcttcccgatatccgacggtagtgtnnnnnntggctgtgttctcagaggctacatct

SEQ ID NO: 12221 - DNA, 81 bp, Artificial Sequence
  MIPs probe
  misc_feature (60)..(65): n is a, c, g, or t
gaataaaactgtctttaaagaagccctcgcttcagcttcccgatatccgacggtagtgtnnnnnntcttcctctccccagg

SEQ ID NO: 12222 - DNA, 80 bp, Artificial Sequence
  MIPs probe
  misc_feature (55)..(60): n is a, c, g, or t
aggtcctggatgggggctgatcaccttcagcttcccgatatccgacggtagtgtnnnnnnagttcctgacacagagatcc

SEQ ID NO: 12223 - DNA, 81 bp, Artificial Sequence
  MIPs probe
  misc_feature (49)..(54): n is a, c, g, or t
ccaccccctaccctcccgcttcagcttcccgatatccgacggtagtgtnnnnnnagcatcttttgttctattatctggtct

SEQ ID NO: 12224 - DNA, 81 bp, Artificial Sequence
  MIPs probe
  misc_feature (59)..(64): n is a, c, g, or t
gaacaaaagatgctcctagcacccctgccttcagcttcccgatatccgacggtagtgtnnnnnngtggggctgaaagttcc

SEQ ID NO: 12225 - DNA, 81 bp, Artificial Sequence
  MIPs probe
  misc_feature (60)..(65): n is a, c, g, or t
gcttaggaaatgacacaggttttaggatccttcagcttcccgatatccgacggtagtgtnnnnnntgccttgctctttctg

SEQ ID NO: 12226 - DNA, 81 bp, Artificial Sequence
  MIPs probe
  misc_feature (60)..(65): n is a, c, g, or t
ggaaaaatcgtaagaaaaaaagcagaaaacttcagcttcccgatatccgacggtagtgtnnnnnntgggacaaacaagtcc

SEQ ID NO: 12227 - DNA, 81 bp, Artificial Sequence
  MIPs probe
  misc_feature (60)..(65): n is a, c, g, or t
gctttgtttctggacttgtttgtcccattcttcagcttcccgatatccgacggtagtgtnnnnnnttctgctttttttctt

SEQ ID NO: 12228 - DNA, 81 bp, Artificial Sequence
  MIPs probe
  misc_feature (60)..(65): n is a, c, g, or t
cagaggaagattctttggtgcaaaaattgcttcagcttcccgatatccgacggtagtgtnnnnnnaagtgctgtttttttt

SEQ ID NO: 12229 - DNA, 81 bp, Artificial Sequence
  MIPs probe
  misc_feature (55)..(60): n is a, c, g, or t
gccacccacgtctatgtaccatgtcttcagcttcccgatatccgacggtagtgtnnnnnnctcatttttctttttttcttt

SEQ ID NO: 12230 - DNA, 81 bp, Artificial Sequence
  MIPs probe
  misc_feature (57)..(62): n is a, c, g, or t
gccacccacgtctatgtaccatgtgacttcagcttcccgatatccgacggtagtgtnnnnnncatttttctttttttcttt

SEQ ID NO: 12231 - DNA, 80 bp, Artificial Sequence
  MIPs probe
  misc_feature (57)..(62): n is a, c, g, or t
gccacccacgtctatgtaccatgtgacttcagcttcccgatatccgacggtagtgtnnnnnncatttttctttttttctt

SEQ ID NO: 12232 - DNA, 81 bp, Artificial Sequence
  MIPs probe
  misc_feature (50)..(55): n is a, c, g, or t
ccccagtctcagctcgacccttcagcttcccgatatccgacggtagtgtnnnnnnctgaagatgtgtctcaagctagtcca

SEQ ID NO: 12233 - DNA, 81 bp, Artificial Sequence
  MIPs probe
  misc_feature (50)..(55): n is a, c, g, or t
gctcgaccctcgagcttgtcttcagcttcccgatatccgacggtagtgtnnnnnntctcaagctagtccatctgagtcaga

SEQ ID NO: 12234 - DNA, 80 bp, Artificial Sequence
  MIPs probe
  misc_feature (55)..(60): n is a, c, g, or t
ggtgaggacgtcacctgggccctgcttcagcttcccgatatccgacggtagtgtnnnnnnagatccacatacaatgatac

SEQ ID NO: 12235 - DNA, 81 bp, Artificial Sequence
  MIPs probe
  misc_feature (59)..(64): n is a, c, g, or t
gaaaggtgaggacgtcacctgggccctgcttcagcttcccgatatccgacggtagtgtnnnnnnagatccacatacaatga

SEQ ID NO: 12236 - DNA, 80 bp, Artificial Sequence
  MIPs probe
  misc_feature (59)..(64): n is a, c, g, or t
gtatgtggatctactgtccctctccaggcttcagcttcccgatatccgacggtagtgtnnnnnntcctcacctttcacca

SEQ ID NO: 12237 - DNA, 81 bp, Artificial Sequence
  MIPs probe
  misc_feature (56)..(61): n is a, c, g, or t
gagggtctgggcagatcttctaggacttcagcttcccgatatccgacggtagtgtnnnnnnggaatctggcctctgactca

SEQ ID NO: 12238 - DNA, 80 bp, Artificial Sequence
  MIPs probe
  misc_feature (59)..(64): n is a, c, g, or t
tgtctcaagctagtccatctgagtcagacttcagcttcccgatatccgacggtagtgtnnnnnnctctgcttccctccta

SEQ ID NO: 12239 - DNA, 78 bp, Artificial Sequence
  MIPs probe
  misc_feature (55)..(60): n is a, c, g, or t
ggagggaagcagagcaggatctcacttcagcttcccgatatccgacggtagtgtnnnnnnatggactagcttgagaca

SEQ ID NO: 12240 - DNA, 81 bp, Artificial Sequence
  MIPs probe
  misc_feature (60)..(65): n is a, c, g, or t
gctgagcatacgtcacctcctgggaactccttcagcttcccgatatccgacggtagtgtnnnnnngcttcaggcttttcct

SEQ ID NO: 12241 - DNA, 80 bp, Artificial Sequence
  MIPs probe
  misc_feature (57)..(62): n is a, c, g, or t
gcctaagagggagagacccagggtgacttcagcttcccgatatccgacggtagtgtnnnnnntgcagaggccaggtgggt

SEQ ID NO: 12242 - DNA, 81 bp, Artificial Sequence
  MIPs probe
  misc_feature (51)..(56): n is a, c, g, or t
ctgggaactccctgcagccacttcagcttcccgatatccgacggtagtgtnnnnnntttcctagagtgactttctaccctc

SEQ ID NO: 12243 - DNA, 81 bp, Artificial Sequence
  MIPs probe
  misc_feature (60)..(65): n is a, c, g, or t
gctcagctttcaggccttgggaagcaggtcttcagcttcccgatatccgacggtagtgtnnnnnnttaaggagaccttctt

SEQ ID NO: 12244 - DNA, 81 bp, Artificial Sequence
  MIPs probe
  misc_feature (55)..(60): n is a, c, g, or t
gctttcaggccttgggaagcaggtcttcagcttcccgatatccgacggtagtgtnnnnnnttaaggagaccttcttcctag

SEQ ID NO: 12245 - DNA, 81 bp, Artificial Sequence
  MIPs probe
  misc_feature (56)..(61): n is a, c, g, or t
gctttcaggccttgggaagcaggtgcttcagcttcccgatatccgacggtagtgtnnnnnntaaggagaccttcttcctag

SEQ ID NO: 12246 - protein, 8 aa, Artificial Sequence
  Synthetic Peptide
DYKDDDDK

We claim:

1. A library comprising a plurality of two or more vectors, each vector comprising:
one or more inverted terminal repeat (ITR) sequences, a 5′ homology arm, a crRNA expression cassette, a chimeric antigen receptor (CAR) expression cassette, and a 3′ homology arm.

2. The library of claim 1, wherein the crRNA expression cassette of each vector independently encodes a first guide RNA and a second guide RNA, wherein the first guide RNA is identical across the plurality of vectors.

3. The library of claims 1 or 2, wherein the second guide RNA is unique to each vector across the plurality of vectors.

4. The library of any one of claims 1-3, wherein one or more sequences encoding the one or more of the encoded guide RNAs of the library are selected from the group consisting of SEQ ID NOs:3-12,134.

5. The library of any one of claims 1-4, wherein the library collectively comprises from about 100 to about 300,000, from about 1,000 to about 5,000 or from about 5000, to about 10,000 distinct guide RNAs.

6. The library of any one of claims 1-7, wherein the library collectively comprises guide RNAs encoded by SEQ ID NOs:3-4,087 (Rene library), SEQ ID NOs:4,088-12,134 (Descartes library), or SEQ ID NOs:3-12,134.

7. The library of any one of claims 1-6, wherein each crRNA expression cassette comprises a U6 promoter operably linked to sequences encoding one or more guide RNAs.

8. The library of any one of claims 1-7, wherein each crRNA expression cassette comprises sequences encoding a first guide RNA and a second guide RNA.

9. The library of any one of claims 1-8, wherein the CAR expression cassette comprises an EFS promoter and/or a polyadenylation signal sequence operationally linked to a sequence encoding the CAR.

10. The library of any one of claims 1-9, wherein the crRNA expression cassette and/or CAR expression cassette of each vector are positioned between the 5′ and 3′ homology arms.

11. The library of any one of claims 1-10, wherein the 5′ and 3′ homology arms are homologous to the TRAC locus.

12. The library of any one of claims 1-11, wherein each vector encodes at least one guide RNA targeting the TRAC locus.

13. The library of any one of claims 1-12, wherein the CAR targets one or more cancer specific antigens or cancer associated antigens.

14. The library of any one of claims 1-13, wherein the CAR is an anti-CD19 CAR or anti-CD22 CAR.

15. The library of any one of claims 2-14, wherein the second guide RNA targets a gene involved in T cell exhaustion, T cell proliferation, T cell co-stimulation, memory T cell differentiation, T cell receptor signaling, epigenetic regulation, adaptive immune response, immune response to tumor cells, other immune functions, or combinations thereof.

16. The library of any one of claims 1-15, wherein the vector
comprises the nucleotide sequence of SEQ ID NO:1 or SEQ ID NO:2 with or without the sequence encoding the TRAC targeting crRNA, with or without one or more additional crRNA encoding sequences optionally inserted at the BbsI cloning site, and/or with the existing CAR encoding sequence or another CAR encoding sequence substituted therefore,
or a sequence variant having 75% or more sequence identity to any of the foregoing.

17. The library of any one of claims 1-16, wherein each vector is a viral vector, preferably an adeno-associated virus (AAV) vector, optionally wherein the AAV is AAV6.

18. A vector of any one of claims 1-17.

19. A population of cells comprising an AAV vector of claim 18.

20. A population of cells collectively comprising the library of any one of claims 1-17, optionally wherein each cell comprises at most one or two AAV vectors comprised in the library.

21. A method of identifying one or more genes that enhance a desired phenotype of a cell comprising a CAR, the method comprising:
(a) contacting the population of cells of claim 20 with an RNA-guided endonuclease under conditions suitable for genomic integration and expression of the guide RNAs and CAR contained in the vectors; and
(b) selecting for cells exhibiting the desired phenotype.

22. The method of claim 21, wherein the crRNA expression cassette and CAR expression cassette are integrated into the TRAC locus.

23. The method of claim 21 or 22, wherein the RNA-guided endonuclease is provided as an mRNA that encodes the RNA-guided endonuclease, a viral vector that encodes the RNA-guided endonuclease, or an RNA-guided endonuclease protein or a complex of the RNA-guided endonuclease protein and RNA.

24. The method of claim 23, wherein the RNA-guided endonuclease is provided by electroporation.

25. The method of any one of claims 21-24, wherein the RNA-guided endonuclease is Cpf1 or an active variant, derivative, or fragment thereof.

26. The method of any one of claims 21-25, wherein the desired phenotype is selected from the group comprising increased tumor/tumor microenvironment infiltration, increased or optimized target cell affinity, increased target cell cytotoxicity, increased persistence, increased expansion/proliferation, reduced exhaustion, increased anti-cancer metabolic function, increased ability to prevent immune escape, reduced unspecific cytokine production, reduced off-target toxicity, reduced cytokine release syndrome (CRS), and combinations thereof.

27. The method of any one of claims 21-26, wherein the step of selecting comprises co-culturing the population of cells with target cells comprising one or more antigens recognized by the CAR for a defined time period, flow cytometry-based or affinity-based sorting, immune marker-based selection, in vivo tumor infiltration, CAR-antigen interaction, directed evolution, or combinations thereof.

28. The method of claim 27, wherein the population of cells is repeatedly co-cultured with the target cells.

29. The method of claim 27 or 28, wherein the time period comprises from about 1 to about 60 days.

30. The method of any one of claims 27-29, wherein the target cells comprise cancer cells.

31. The method of any one of claims 21-30, further comprising identifying the crRNA expression cassette present in the selected cells.

32. The method of claim 31, wherein the step of identifying the crRNA expression cassette comprises sequencing genomic DNA of the selected cells.

33. The method of claim 31 or 32, wherein the one or more genes that enhance a desired phenotype are identified as genes targeted by the guide RNAs encoded by the crRNA expression cassette.

34. The method of any one of claims 21-33, wherein the population of cells comprises effector T cells, memory T cells, central memory T cells, effector memory T cells, Th1 cells, Th2 cells, Th3 cells, Th9 cells, Th17 cells, Tfh cells, Treg cells, gamma-delta T cells, hematopoietic stem cells (HSC), macrophages, natural killer cells (NK), B cells, dendritic cells (DC), or other immune cells.

35. The method of claim 34, wherein the T cells are CD4⁺ or CD8⁺ T cells.

36. An isolated CAR T cell comprising a CAR and one or more mutations in one or more genes identified by the method of any one of claims 21-35.

37. The CAR T cell of claim 36, wherein the one or more mutations cause reduced function of the one or more genes or gene products thereof.

38. The CAR T cell of claim 36 or 37, wherein the one or more genes is selected from the group comprising PRDM1, DPF3, SLAMF1, TET2, HFE, PELI1, PDCD1, HAVCR2/TIM3, TET2, NR4A2, LAIR1, and USB1.

39. The CAR T cell of any one of claims 36-38, wherein the cell exhibits increased memory, increased cell proliferation, increased persistence, increased cytotoxicity towards a target cell, decreased T cell terminal differentiation, and/or reduced T cell exhaustion compared to a CAR T cell not comprising the one or more mutations in the one or more genes.

40. A population of CAR T cells derived by expanding the CAR T cell of any one of claims 36-39.

41. A pharmaceutical composition comprising the population of CAR T cells of claim 40 and a pharmaceutically acceptable buffer, carrier, diluent or excipient.

42. A method of treating a subject having a disease, disorder, or condition comprising administering to the subject an effective amount of the pharmaceutical composition of claim 41.

43. The method of claim 42, wherein the disease, disorder, or condition is associated with an elevated expression or specific expression of an antigen.

44. The method of claim 43, wherein the CAR T cell targets the antigen.

45. The method of any one of claims 42-44, wherein the cell was isolated from a healthy donor or from the subject having the disease, disorder, or condition prior to the introduction of the one or more mutations in the one or more genes.

46. The method of any one of claims 42-45, wherein the disease, disorder, or condition is a cancer, an inflammatory disease, a neuronal disorder, HIV/AIDS, diabetes, a cardiovascular disease, an infectious disease, or an autoimmune disease.

47. The method of claim 46, wherein the cancer is a leukemia or lymphoma selected from the group comprising chronic lymphocytic leukemia (CLL), acute lymphocytic leukemia (ALL), acute myeloid leukemia (AML), chronic myelogenous leukemia (CML), mantle cell lymphoma, non-Hodgkin's lymphoma, and Hodgkin's lymphoma.

48. The method of any one of claims 42-47, wherein the subject is a human.

49. A cell comprising a heterologous nucleic acid construct comprising one or more crRNA expression cassettes comprising a nucleic acid sequence encoding one or more guide RNAs selected from the group consisting of SEQ ID NOs:3-12,134 and a chimeric antigen receptor (CAR) expression cassette.

50. A cell comprising a heterologous nucleic acid construct encoding a chimeric antigen receptor (CAR) expression cassette and reduced or eliminated expression at one or more gene loci targeted by one or more guide RNAs selected from the group consisting of SEQ ID NOs:3-12,134 and.

51. The cell of claims 49 or 50, wherein the heterologous nucleic acid construct is present in the cell's genome at the TRAC gene locus, and optionally wherein the CAR is an anti-CD19 or anti-CD22 CAR.
